(19) United States
(12) Patent Application Publication
(10) Pub. No.: US 2025/0243274 A1
(43) Pub. Date: Jul. 31, 2025

(54) Compositions for Redirecting Immunoglobulins to Immune Cells

(71) Applicant: Jibe Therapeutics, Inc., Somerville, MA (US)

(72) Inventor: Austin Wayne Boesch, Somerville, MA (US)

(21) Appl. No.: 18/791,355

(22) Filed: Jul. 31, 2024

Related U.S. Application Data
(60) Provisional application No. 63/516,632, filed on Jul. 31, 2023.

(51) Int. Cl. C07K 16/28; A61K 39/00; C07K 14/735

(52) U.S. Cl. CPC C07K 16/2809; C07K 14/70535; A61K 2039/505; C07K 2317/24; C07K 2317/31; C07K 2317/53; C07K 2317/565; C07K 2317/567; C07K 2317/569; C07K 2317/622; C07K 2317/94; C07K 2319/30

(57) ABSTRACT

The present invention relates to heterologous polypeptides or multimeric proteins, and nucleic acids encoding the same, comprising at least one immunoglobulin-binding domain and at least immune cell surface polypeptide or protein binding domain. Molecules of the invention can be used as a monotherapy or used to enhance standard, current or experimental antibody-based immunotherapy, such as cancer, autoimmunity or pathogenic infections.

### CROSS-REFERENCE TO RELATED APPLICATIONS

[0001] This application claims the benefit of U.S. Provisional Application No. 63/516,632, filed Jul. 31, 2023, which is hereby incorporated by reference herein in its entirety for all purposes.

### SEQUENCE LISTING

[0002] This application contains a Sequence Listing which has been submitted electronically in ST.26 formatted XML format. The Sequence Listing XML is incorporated herein by reference. Said XML files, created on Jul. 31, 2024, is named 783334_000002_SL.xml and is 157400 bytes in size.

### FIELD

[0003] The field of the invention generally relates to immunology, and more specifically relates to proteins for use in modulating disease.

### BACKGROUND

[0004] While naturally occurring antibodies, therapeutic antibodies, recombinant therapeutic antibodies and Fc receptor binding recombinant therapeutic proteins can provide great benefit in modulating disease such as cancer, autoimmunity, organ rejection, pathogenic infections such as viruses, bacteria, parasites or fungus, they are limited in the cell types they can engage based on the Fc receptors for which they have affinity and specificity.

[0005] It would be advantageous to have a mechanism for engaging antibodies, therapeutic antibodies, recombinant therapeutic antibodies and Fc receptor binding recombinant therapeutic proteins with additional cell surface proteins and cell types.

### SUMMARY OF THE INVENTION

[0006] The present invention relates to heterologous polypeptides or multimeric proteins and nucleic acids encoding the same that comprise at least one immunoglobulin-binding domain and at least one immune cell surface protein-binding domain thus creating an Immunoglobulin Redirector (IgR) molecules capable of engaging immune cells and modulating cellular activity such as effector function or suppression. IgRs of the invention can be used as a monotherapy or in combination with one or more standard, current or experimental therapeutics. such as cancer, immune disorders, or pathogenic infections.

[0007] In some embodiments, a heterologous polypeptide or multimeric protein and nucleic acids encoding the same, comprises:
[0008] (a) at least one immunoglobulin binding domain with affinity and specificity for one or more immunoglobulin isotypes, subclasses, allotypes, variants, derivatives and analogs thereof; and
[0009] (b) at least one immune cell surface protein-binding domain;
[0010] (c) optionally, at least one immunoglobulin binding domain with affinity and specificity for one or more immunoglobulin isotypes, subclasses, allotypes, variants, derivatives and analogs thereof,
[0011] (d) optionally, at least one immunoglobulin-binding domain capable of, but not limited to, binding wild-type immunoglobulin.

[0012] In some embodiments, a heterologous polypeptide or multimeric protein and nucleic acids encoding the same, comprises:
[0013] (a) at least two immunoglobulin-binding domain; and
[0014] (b) at least one immune cell surface protein-binding domain;
[0015] (c) optionally, at least two immunoglobulin binding domains with affinity and specificity for one or more immunoglobulin isotypes, subclasses, allotypes, variants, derivatives and analogs thereof,
[0016] (d) optionally, at least two immunoglobulin-binding domains capable of, but not limited to, binding wild-type immunoglobulin.

[0017] In some embodiments, a heterologous polypeptide or multimeric protein and nucleic acids encoding the same, comprises:
[0018] (a) at least one immunoglobulin-binding domain; and
[0019] (b) at least one immune cell surface protein-binding domain; and
[0020] (c) is capable of mediating immune cell activity in the presence of target specific antibodies that is substantially greater than the immune cell activity in the presence of non-specific antibodies that it is capable of binding;
[0021] (d) optionally, at least one immunoglobulin-binding domain with affinity and specificity for one or more immunoglobulin isotypes, subclasses, allotypes, variants, derivatives and analogs thereof,
[0022] (e) optionally, at least one immunoglobulin-binding domain capable of, but not limited to, binding wild-type immunoglobulin;
[0023] (f) optionally, is capable of mediating immune cell activity in the presence of target specific antibodies and non-specific antibodies, that it is capable of binding, that is substantially greater than the immune cell activity in the presence of non-specific antibodies;
[0024] (g) optionally, is capable of mediating immune cell activity in the presence of target specific antibodies and non-specific antibodies, that it is capable of binding, that is not substantially less than the immune cell activity in the presence of target specific antibodies.

[0025] In some embodiments, a heterologous polypeptide or multimeric protein and nucleic acids encoding the same, comprises:
[0026] (a) at least two immunoglobulin binding domain; and
[0027] (b) at least one immune cell surface protein-binding domain; and
[0028] (c) is capable of mediating immune cell activity in the presence of target specific antibodies that is substantially greater than the immune cell activity in the presence of non-specific antibodies that it is capable of binding;
[0029] (d) optionally, at least two immunoglobulin binding domains with affinity and specificity for one or more immunoglobulin isotypes, subclasses, allotypes, variants, derivatives and analogs thereof.
[0030] (e) optionally, at least two immunoglobulin-binding domains capable of, but not limited to, binding wild-type immunoglobulin;
[0031] (f) optionally, is capable of mediating immune cell activity in the presence of target specific antibodies and non-specific antibodies, that it is capable of binding, that is substantially greater than the immune cell activity in the presence of non-specific antibodies;
[0032] (g) optionally, is capable of mediating immune cell activity in the presence of target specific antibodies and non-specific antibodies, that it is capable of binding, that is not substantially less than the immune cell activity in the presence of target specific antibodies.

[0033] In some embodiments, or in combination of any one of the previous claims, a heterologous polypeptide and nucleic acids encoding the same, wherein:
[0034] (a) the heterologous polypeptide is a single chain with at least three domains and optional linkers between the three domains following the diagram below:
   [0035] D1-D2-D3; or
[0036] (b) the heterologous polypeptide is a single chain with at least four domains and optional linkers between the four domains following the diagram below:
   [0037] D1-D2-D3-D4

[0038] In some embodiments, or in combination of any one of the previous claims, a heterologous polypeptide or multimeric protein and nucleic acids encoding the same, wherein:
[0039] (a) at least one immunoglobulin-binding domain is derived from an antigen-binding domain, antibody or antigen-binding fragment their variants, derivatives or analogs thereof;
[0040] (b) optionally, at least one immunoglobulin-binding domain is derived from an antigen-binding domain, antibody or antigen-binding fragment their variants, derivatives or analogs thereof, including but not limited to, VH and VL pairs, ScFv, Fab, IgG, sdAb-VL, sdAb-VH, VHH or avimer, their derivatives or analogs thereof;
[0041] (c) optionally, at least one immunoglobulin-binding domain is derived from an antigen-binding domain, antibody or antigen-binding fragment their variants, derivatives or analogs thereof with affinity and specificity for one or more immunoglobulin isotypes, subclasses, allotypes, variants, derivatives or analogs thereof, including but not limited to: IgG, IgG1, IgG2, IgG3, IgG4, IgA, IgA1, IgA2, IgM, IgE, IgD.

[0042] In some embodiments, or in combination of any one of the previous claims, a heterologous polypeptide or multimeric protein and nucleic acids encoding the same, wherein:
[0043] (a) at least one immunoglobulin-binding domain is derived from an Fc receptor or Fc binder including but not limited to FcγRIII, mFcγRIV, FcγRIIa, FcγRIIb, FcγRIIc, FcγRI, mFcγRIII, mFcγRIIa, mFcγRIIb, mFcγRI, FcαRI, C1q, FcRL, FcRL5, pIgR, Fcα/μR, FcμR, FcεRI, FcεRII, FcRn, TRIM21 including allotypes, derivatives and analogs thereof;
[0044] (b) optionally, the Fc receptor is capable of binding one or more immunoglobulin subclasses, allotypes, derivatives and analogs thereof, including but not limited to: IgG, IgG1, IgG2, IgG3, IgG4, IgA, IgA1, IgA2, IgM, IgE, IgD;
[0045] (c) optionally, FcγRIIa comprises one or more mutations including but not limited R56H, K118N, T120V, L160Q and V172E, according to the residue number in SEQ ID NO: 9;
[0046] (d) optionally, FcγRIII comprises one or more mutations including but not limited S181P, K122N, T124V, Q176-E, 190R, T118K, A119L and Y134F, according to the residue number in SEQ ID NO: 1;
[0047] (e) optionally, FcγR comprises a domain from a first FcγR and a domain from an FcγR that is different from the first.

[0048] In some embodiments, or in combination of any one of the previous claims, a heterologous polypeptide or multimeric protein and nucleic acids encoding the same, comprises:
[0049] (a) at least one immune cell surface protein-binding domain derived from a natural soluble protein or ligand, including variants, derivatives and analogs thereof,
[0050] (b) optionally, at least one immune cell surface protein-binding domain derived from a natural soluble protein or ligand, including variants, derivatives and analogs thereof, including but not limited to: cytokines, chemokines, pentraxins, galectin-9, HMGB1, TGF-beta, growth factors, pattern recognition proteins, lectins, enzymes, peptides, glycans, lipids or metabolites.

[0051] In some embodiments, or in combination of any one of the previous claims, a heterologous polypeptide or multimeric protein and nucleic acids encoding the same, comprises:
[0052] (a) at least one immune cell surface protein-binding domain derived from the extracellular portion of a natural receptor or ligand, including derivatives and analogs thereof;
[0053] (b) optionally, at least one immune cell surface protein-binding domain derived from the extracellular portion of a natural receptor or ligand, including variants, derivatives and analogs thereof, including but not limited to: CD3, CD3ε, CD3δ, CD3γ, TCR, TCRα, TCRβ, TCRγ, TCRδ or combinations thereof, TCR complex, CD8, CD4, CD2, CCR8, TNFR2, CD39, CD103, Fas Ligand, MHC-I, MHC-II, MHC-G, HLA-DR, CD226, CD27, CD209, CD206, Galectin-3, LSECtin, FGL1, CD112, CD155, HVEM, CEACAM-1, CD40, CD40L, CD137, CD137L, CD28, CD56, NKG2D, NKp46, PD1, PDL1, PDL1, CTLA4, CLEC5A, CD79, BCR, OX40, OX40L, TIM3, TIM1, TIGIT, CD7, LAG3, CD11a, CD11b, CD18, CD80, CD86 or FcγRIIIa, FcγRIV, FcγRIIIb, FcγRIIa, FcγRIIc, FcγRIIb, FcγRI, C1q, FcRL5, pIgR, FcaRI, Fcα/μR, FcμR, FcεRI, FcεRII, FcRn, DC-SIGN, CD47, SIRP1α, CD96, VISTA, BTLA, B7-H3, chemokine receptors, cytokine receptors, growth factor receptors, pattern recognition receptors, enzymes, glycans, lipids, MICA, ULBP-1, ULBP-2, CD121a, CD121b, IL-18Rα, IL-18Rβ, CD25, CD122, CD132, CD124, CD213a13, CD127, CD360, CD19, CD20, CD5, IL-9R, CD213a1, CD213a2, IL-15Ra, CD123, CDw131, CDw125, CD131, CD116, CDw131, CD126, CD130, IL-11Ra, CD130, CD114, CD212, LIFR, CD130, OSMR, CDw210, IL-20Rα, IL-20Rβ, IL-14R, CDw217, CD118, CDw119, LTβR, CD120a, CD120b, BCMA, TACI, CD30, CD95 (Fas), GITR, GITRL, LTbR, TRAILR1-4, Apo3, RANK, OPG, TGF-βR1, TGF-βR2, TGF-βR3, EpoR, TpoR, Flt-3, CD117, CD115, CDw136, dectin-1, dectin-2, and dectin-3.

[0054] In some embodiments, or in combination of any one of the previous claims, a heterologous polypeptide or multimeric protein and nucleic acids encoding the same, wherein:
[0055] (a) at least one immune cell surface protein-binding domain is an antigen-binding domain, antibody or antigen-binding fragment including variants, derivatives or analogs thereof with affinity and specificity for the extracellular portion of a natural receptor or ligand;
[0056] (b) optionally, at least one immune cell surface protein-binding domain is an antigen-binding domain, antibody or antigen-binding fragment including variants, derivatives or analogs thereof with affinity and specificity for the extracellular portion of a natural receptor or ligand, including but not limited to: CD3, CD3ε, CD3δ, CD3γ, TCR, TCRα, TCRβ, TCRγ, TCRδ or combinations thereof, TCR complex, CD8, CD4, CD2, CCR8, TNFR2, CD39, CD103, Fas Ligand, MHC-I, MHC-II, MHC-G, HLA-DR, CD226, CD27, CD209, CD206, Galectin-3, LSECtin, FGL1, CD112, CD155, HVEM, CEACAM-1, CD40, CD40L, CD137, CD137L, CD28, CD56, NKG2D, NKp46, PD1, PDL1, PDL1, CTLA4, CLEC5A, CD79, BCR, OX40, OX40L, TIM3, TIM1, TIGIT, CD7, LAG3, CD11a, CD11b, CD18, CD80, CD86 or FcγRIIIa, FcγRIV, FcγRIIIb, FcγRIIa, FcγRIIc, FcγRIIb, FcγRI, C1q, FcRL5, pIgR, FcαRI, Fcα/μR, FcμR, FcεRI, FcεRII, FcRn, DC-SIGN, CD47, SIRP1α, CD96, VISTA, BTLA, B7-H3, chemokine receptors, cytokine receptors, growth factor receptors, pattern recognition receptors, enzymes, glycans, lipids, MICA, ULBP-1, ULBP-2, CD121a, CD121b, IL-18Rα, IL-18Rβ, CD25, CD122, CD132, CD124, CD213a13, CD127, CD360, CD19, CD20, CD5, IL-9R, CD213a1, CD213a2, IL-15Ra, CD123, CDw131, CDw125, CD131, CD116, CDw131, CD126, CD130, IL-11Ra, CD130, CD114, CD212, LIFR, CD130, OSMR, CDw210, IL-20Rα, IL-20Rβ, IL-14R, CDw217, CD118, CDw119, LTβR, CD120a, CD120b, BCMA, TACI, CD30, CD95 (Fas), GITR, GITRL, LTbR, TRAILR1-4, Apo3, RANK, OPG, TGF-βR1, TGF-βR2, TGF-βR3, EpoR, TpoR, Flt-3, CD117, CD115, CDw136 dectin-1, dectin-2, and dectin-3.

[0057] In some embodiments, or in combination of any one of the previous claims, a heterologous polypeptide or multimeric protein and nucleic acids encoding the same, wherein:
[0058] (a) at least one immune cell surface protein-binding domain is an antigen-binding domain, antibody or antigen-binding fragment their derivatives or analogs thereof, with affinity and specificity for the extracellular portion of a natural receptor or ligand present on, but not limited to: Lymphoid cells, Myeloid cells, T cells, B cells, NK cells, Macrophages, Monocytes, NK-T cells, Neutrophils, Dendritic cells, Basophils, Eosinophils and Mast cells;
[0059] (b) optionally, at least one immune cell surface protein-binding domain is an antigen-binding domain, antibody or antigen-binding fragment including not limited to a VH and VL pair, ScFv, Fab, IgG or sdAb-VL, sdAb-VH, VHH, their variants, derivatives or analogs thereof, with affinity and specificity for the extracellular portion of a natural receptor or ligand present on, but not limited to: Lymphoid cells, Myeloid cells, T cells, B cells, NK cells, Macrophages, Monocytes, NK-T cells, Neutrophils, Dendritic cells, Basophils, Eosinophils and Mast cells.

[0060] In some embodiments, or in combination of any one of the previous claims, a heterologous polypeptide or multimeric protein and nucleic acids encoding the same, wherein an additional region comprises:
[0061] (a) at least one half-life extension domain including but not limited to HSA, anti-HSA, their derivatives or analogs thereof; and
[0062] (b) optionally, the anti-serum albumin domain comprises, but is not limited to, one or more CDR or FR regions defined in SEQ ID NO: 558, 559, 560, 561, 562, 563, 564, 565, 566, 567, 568, 569, 570, 571, 572, 573, 574, 575, 576, 577 and 578, provided in Table 16, including variants, derivatives and analogs thereof.

[0063] In some embodiments, or in combination of any one of the previous claims, a multimeric protein and nucleic acids encoding the same, wherein additional regions of the molecule comprises:
[0064] (a) two half-life extension domains including but not limited to an Fc polypeptide derived from an immunoglobulin wherein the Fc does not substantially bind said immunoglobulin-binding region; and
[0065] (b) wherein the first and second Fc polypeptides comprise a hetero-multimerization domain wherein the hetero-multimerization domain may be a knob into hole mutation or mutations and the like.

[0066] In some embodiments, or in combination of any one of the previous claims, a multimeric protein and nucleic acids encoding the same, wherein additional regions of the molecule comprises:
[0067] (a) two half-life extension domains including but not limited to an Fc polypeptide derived from an immunoglobulin wherein the Fc does not substantially bind said immunoglobulin-binding region by selection of IgG heavy chain Fc polypeptide including, but not limited to, mutations L234A, L235A and P329A or alternatively P329G in the constant heavy chain domain 2 (EU Numbering); and
[0068] (b) wherein the first and second Fc polypeptides comprise a hetero-multimerization domain wherein the hetero-multimerization domain is selected from a knob into hole mutation or mutations and the like.

[0069] In some embodiments, or in combination of any one of the previous claims, a multimeric protein and nucleic acids encoding the same of any one of claims, wherein additional regions of the molecule comprises:
[0070] (a) two half-life extension domains including but not limited to an Fc polypeptide derived from an immunoglobulin wherein the Fc does not substantially bind said immunoglobulin-binding region by selection of IgG heavy chain Fc polypeptide including, but not limited to, the mutations L234A, L235A and P329A or alternatively P329G in the constant heavy chain domain 2 (EU Numbering);
[0071] (b) wherein the first Fc polypeptide includes, but not limited, to mutation T366W and optionally S354C; and wherein the second Fc polypeptide includes, but not limited to, T366S, L368A and Y407V and optionally Y349C in the constant heavy chain domain 3 (EU Numbering).

[0072] In some embodiments, or in combination of any one of the previous claims, a multimeric protein and nucleic acids encoding the same, wherein additional regions of the molecule comprises:
[0073] (a) one or more immunoglobulin kappa or lambda constant light chain, their variants, derivatives and analogs thereof,
[0074] (b) one or more immunoglobulin constant heavy chain domain 1 and all, none or a portion of the immunoglobulin hinge region, their variants, derivatives and analogs thereof;
[0075] (c) optionally, at least two immunoglobulin kappa constant light chains, their variants, derivatives and analogs thereof;
[0076] (d) optionally, at least two immunoglobulin lambda constant light chains, their variants, derivatives and analogs thereof;
[0077] (e) optionally, at least one immunoglobulin kappa constant light chain, and one immunoglobulin lambda constant light chain, their variants, derivatives and analogs thereof;
[0078] (f) optionally, one or more constant heavy chain domain 1 and all, none or a portion of the hinge comprises mutation C233S or the like and constant light chain C214S or the like (Kabat Numbering);
[0079] (g) optionally, one or more constant heavy chain domain 1 and all, none or a portion of the hinge comprises mutation C233S and F174C or the like and constant light chain C214S and S176C or the like (Kabat Numbering);
[0080] (h) optionally, at least a first pair of constant heavy chain and all, none or a portion of the hinge that comprises no mutation at C233 or the like and no mutation in constant light chain at C214 or the like and at least a second pair of constant heavy chain domain 1 all, none or a portion of the hinge comprises mutation C233S or the like and constant light chain C214S or the like (Kabat Numbering);
[0081] (i) optionally, at least a first pair of constant heavy chain and all, none or a portion of the hinge that contain no mutation at C233 or the like and no mutation in constant light chain at C214 or the like and at least a second pair of constant heavy chain domain 1 and all, none or a portion of the hinge comprises mutation C233S and F174C or the like and the constant light chain comprises mutation C214S and S176C or the like (Kabat Numbering);
[0082] (j) optionally, at least a first pair of constant heavy chain domain 1 and all, none or a portion of the hinge comprises mutation C233S or the like and constant light chain C214S or the like and at least a second pair of constant heavy chain domain 1 and all, none or a portion of the contains mutation C233S and F174C or the like and constant light chain C214S and S176C or the like (Kabat Numbering).

[0083] In some embodiments, or in combination of any one of the previous claims, a heterologous polypeptide or multimeric protein and nucleic acids encoding the same, wherein an additional region or regions of the molecule comprises:
[0084] (a) at least a second immunoglobulin-binding domain wherein the second immunoglobulin-binding domain is the same as the first immunoglobulin-binding domain; or
[0085] (b) at least a second immunoglobulin-binding domain wherein the second immunoglobulin-binding domain is different from the first immunoglobulin-binding domain;
[0086] (c) optionally, at least a second immunoglobulin-binding domain wherein the second immunoglobulin-binding domain is separated from the first immunoglobulin-binding domain by suitable linkers that can be of different lengths, such as from 1 amino acid (e.g., Gly) to 20 amino acids, from 2 amino acids to 15 amino acids, from 3 amino acids to 12 amino acids, including 4 amino acids to 10 amino acids, amino acids to 9 amino acids, 6 amino acids to 8 amino acids, or 7 amino acids to 8 amino acids, and may be 1, 2, 3, 4, 5, 6, 7, 8, 9, 10, 11, 12, 13, 14, 15, 16, 17, 18, 19, 20, 21, 22, 23, 24, 25, 26, 27, 28, 29, 30, 31, 32, 33, 34, 35, 36, 37, 38, 39, 40, 41, 42, 43, 44, 45, 46, 47, 48, 49, 50, 51, 52, 53, 54, 55, 56, 57, 58, 59, or 60 amino acids including but not limited to regions of the human constant heavy chain domain 1, kappa or lambda chain domains, polypeptides comprising linkers 13 amino acids or less, linkers 6 amino acids or less, the constant heavy chain domain 1 derived spacer ASTKGPSVFPLAP, ASTKGP or ASTKGPSVFPLAS, the constant kappa chain derived spacer RTVAAPSVFIFPP or RTVAAP, the constant lambda chain derived spacer SQPKAAPSVTLFP, GQPKANPTVTLFP, GQPKAAPSVTLFP, SQPKAA, GQPKAN or GQPKAA, (GGGS)₁, (GGGS)₂, (GGGS)₃, (GGGS)₄;
[0087] (d) optionally, at least a second immunoglobulin-binding domain wherein the second immunoglobulin-binding domain is the same as the first immunoglobulin-binding domain wherein the domains are not arranged head to tail if they are derived from FcγR type Fc receptors;
[0088] (e) optionally, at least a second immunoglobulin-binding domain wherein the second immunoglobulin-binding domain is the same as the first immunoglobulin-binding domain wherein the domains are arranged head to tail if they are derived from FcγR type Fc receptors.

[0089] In some embodiments, or in combination of any one of the previous claims, a heterologous polypeptide or multimeric protein and nucleic acids encoding the same, wherein an additional region of the molecule comprises:
[0090] (a) at least a second immune cell surface protein binding domain wherein the second immune cell binding domain is different from the first immune cell surface protein binding domain; or
[0091] (b) at least a second immune cell surface protein-binding domain wherein the second immune cell surface protein binding domain is the same as the first immune cell surface protein binding domain;
[0092] (c) optionally, at least a second immunoglobulin-binding domain wherein the second immunoglobulin-binding domain is separated from the first immunoglobulin-binding domain by suitable linkers that can be of different lengths, such as from 1 amino acid (e.g., Gly) to 20 amino acids, from 2 amino acids to 15 amino acids, from 3 amino acids to 12 amino acids, including 4 amino acids to 10 amino acids, amino acids to 9 amino acids, 6 amino acids to 8 amino acids, or 7 amino acids to 8 amino acids, and may be 1, 2, 3, 4, 5, 6, 7, 8, 9, 10, 11, 12, 13, 14, 15, 16, 17, 18, 19, 20, 21, 22, 23, 24, 25, 26, 27, 28, 29, 30, 31, 32, 33, 34, 35, 36, 37, 38, 39, 40, 41, 42, 43, 44, 45, 46, 47, 48, 49, 50, 51, 52, 53, 54, 55, 56, 57, 58, 59, or 60 amino acids including but not limited to regions of the human constant heavy chain domain 1, kappa or lambda chain domains, polypeptides comprising linkers 13 amino acids or less, linkers 6 amino acids or less, the constant heavy chain domain 1 derived spacer ASTKGPSVFPLAP, ASTKGP or ASTKGPSVFPLAS, the constant kappa chain derived spacer RTVAAPSVFIFPP or RTVAAP, the constant lambda chain derived spacer SQPKAAPSVTLFP, GQPKANPTVTLFP, GQPKAAPSVTLFP, SQPKAA, GQPKAN or GQPKAA, (GGGS)₁, (GGGS)₂, (GGGS)₃, (GGGS)₄;

[0093] In some embodiments, or in combination of any one of the previous claims, a heterologous polypeptide or multimeric protein and nucleic acids encoding the same, wherein a region or multiple regions of the molecule comprises:
[0094] (a) a single amino acid mutations or multiple amino acid mutations wherein the immunoglobulin binding domain does not substantially bind itself or another region or regions of the molecule;
[0095] (b) optionally the mutation of one or more amino acids in one or more constant domains of human IgG1, IgG2, IgG3 or IgG4, variants, derivatives and analogs thereof,
[0096] (c) optionally the mutation of one or more amino acids in the constant heavy chain domain 1 including, but not limited to, F122Y, P1265 and K213E (Kabat Numbering);
[0097] (d) optionally the mutation of one or more amino acids in a hinge region;
[0098] (e) optionally the mutation of one or more amino acids in a in the constant heavy chain domain 2 including, but no limited to, N276K, L309V, L234A, L235A and P329A or alternatively P329G (EU Numbering);
[0099] (f) optionally the mutation of one or more amino acids in a constant heavy chain domain 3;
[0100] (g) optionally the mutation of one or more amino acids in a human kappa or lambda domain.
[0101] (h) optionally the mutation of one or more amino acids in one or more light chain or heavy chain FR domains.

[0102] In some embodiments, or in combination of any one of the previous claims, a heterologous polypeptide or multimeric protein and nucleic acids encoding the same, wherein a region or multiple regions of the molecule comprises:
[0103] (a) at least one immunoglobulin binding domain comprising, but not limited to, one or more CDR or FR regions defined in SEQ ID NO: 579 through SEQ ID NO: 718, provided in Table 17, including variants, derivatives and analogs thereof, or
[0104] (b) at least one immunoglobulin binding domain consisting of anti-Fc AVIG, SEQ ID NO: 132, variants, derivatives and analogs thereof.

[0105] In some embodiments, or in combination of any one of the previous claims, a heterologous polypeptide or multimeric protein and nucleic acids encoding the same, wherein a region or multiple regions of the molecule comprises:
[0106] (a) at least one immune cell surface protein binding domain comprising, but not limited to, one or more CDR or FR regions defined in SEQ ID NO: 719 through SEQ ID NO: 1558, provided in Tables 18, 19, 20, 21, 22, 23, 24, 25, 26, 27 and 28, including variants, derivatives and analogs thereof.

[0107] In some embodiments, or in combination of any one of the previous claims, a heterologous polypeptide or multimeric protein and nucleic acids encoding the same, wherein an additional region of the molecule comprises a free cysteine at or near the C-terminus.

[0108] In some embodiments, or in combination of any one of the previous claims, a heterologous polypeptide or multimeric protein and nucleic acids encoding the same, wherein an additional region of the molecule comprises a covalently linked PEG-lipid.

[0109] In some embodiments, or in combination of any one of the previous claims, a heterologous polypeptide or multimeric protein and nucleic acids encoding the same, comprising:
[0110] (a) at least one immunoglobulin binding domain that blocks immunoglobulins from binding one or more of their cognate receptors; or
[0111] (b) at least one immunoglobulin binding domain that does not block immunoglobulins from binding one or more of their cognate receptors; or
[0112] (c) optionally, at least two immunoglobulin binding domains that block immunoglobulins from binding one or more of their cognate receptors; or
[0113] (d) optionally, at least two immunoglobulin binding domains that do not block immunoglobulins from binding one or more of their cognate receptors; or
[0114] (e) optionally, at least two immunoglobulin binding domains wherein a first immunoglobulin binding domain blocks immunoglobulins from binding one or more of their cognate receptors and a second immunoglobulin binding domain that does not block immunoglobulins from binding one or more of their cognate receptors.

[0115] In some embodiments, a multimeric protein and nucleic acids encoding the same, wherein regions of the molecule comprises:
[0116] (a) one or more immunoglobulin kappa or lambda constant light chain, their variants, derivatives and analogs thereof,
[0117] (b) one or more immunoglobulin constant heavy chain domain 1 and all, none or a portion of the immunoglobulin hinge region, their variants, derivatives and analogs thereof;
[0118] (c) optionally, at least two immunoglobulin kappa constant light chains, their variants, derivatives and analogs thereof;
[0119] (d) optionally, at least two immunoglobulin lambda constant light chains, their variants, derivatives and analogs thereof;
[0120] (e) optionally, at least one immunoglobulin kappa constant light chain, and one immunoglobulin lambda constant light chain, their variants, derivatives and analogs thereof;
[0121] (f) optionally, one or more constant heavy chain domain 1 and all, none or a portion of the hinge comprises mutation C233S or the like and constant light chain C214S or the like (Kabat Numbering);
[0122] (g) optionally, one or more constant heavy chain domain 1 and all, none or a portion of the hinge comprises mutation C233S and F174C or the like and constant light chain C214S and S176C or the like (Kabat Numbering);
[0123] (h) optionally, at least a first pair of constant heavy chain and all, none or a portion of the hinge that comprises no mutation at C233 or the like and no mutation in constant light chain at C214 or the like and at least a second pair of constant heavy chain domain 1 all, none or a portion of the hinge comprises mutation C233S or the like and constant light chain C214S or the like (Kabat Numbering);
[0124] (i) optionally, at least a first pair of constant heavy chain and all, none or a portion of the hinge that contain no mutation at C233 or the like and no mutation in constant light chain at C214 or the like and at least a second pair of constant heavy chain domain 1 and all, none or a portion of the hinge comprises mutation C233S and F174C or the like and the constant light chain comprises mutation C214S and S176C or the like (Kabat Numbering);
[0125] (j) optionally, at least a first pair of constant heavy chain domain 1 and all, none or a portion of the hinge comprises mutation C233S or the like and constant light chain C214S or the like and at least a second pair of constant heavy chain domain 1 and all, none or a portion of the contains mutation C233S and F174C or the like and constant light chain C214S and S176C or the like (Kabat Numbering).

[0126] In some embodiments, or in combination of any one of the previous claims, a multimeric protein and nucleic acids encoding the same, wherein additional regions of the molecule comprise:
[0127] (a) two half-life extension domains including but not limited to an Fc polypeptide derived from an immunoglobulin wherein the first and second Fc polypeptides comprise a hetero-multimerization domain wherein the hetero-multimerization domain is selected from a knob into hole mutation or mutations and the like; and
[0128] (b) optionally, wherein the first Fc polypeptide includes, but is not limited to, mutation T366W and optionally S354C; and wherein the second Fc polypeptide includes, but is not limited to, T366S, L368A and Y407V and optionally Y349C in the constant heavy chain domain 3 (EU Numbering);
[0129] (c) optionally, wherein the Fc does not substantially bind one or more of its cognate Fc receptors by selection of IgG heavy chain Fc polypeptide;
[0130] (d) optionally, wherein the Fc does not substantially bind one or more of its cognate Fc receptors by selection of IgG heavy chain Fc polypeptide including, but no limited to, mutation L234A, L235A and P329A or alternatively P329G in the constant heavy chain domain 2 (EU Numbering).

[0131] In some embodiments, or in combination of any one of the previous claims, a method using a heterologous polypeptide or multimeric protein and nucleic acids encoding the same of any one of claims 1-26 to treat disease as:
[0132] (a) a monotherapy or;
[0133] (b) in combination with one or more standard, current or experimental therapeutics to treat cancer, immune disorders and pathogenic infections.

[0134] In some embodiments, or in combination of any one of the previous claims, a method using a heterologous polypeptide or multimeric protein and nucleic acids encoding the same of any one of claims 1-27 to treat disease as:
[0135] (a) a monotherapy capable of binding endogenous immunoglobulins; or
[0136] (b) in combination with one or more standard, current or experimental therapeutics to treat cancer, immune disorders and pathogenic infections.

[0137] In some embodiments, or in combination of any one of the previous claims, a kit comprising heterologous polypeptide or multimeric protein and nucleic acids encoding the same.

### BRIEF DESCRIPTION OF THE DRAWINGS

[0138] FIG. 1. Depiction of Immunoglobulins (Ig) mediating effector function(s) by bridging diseased cells (ex cancer, pathogen infection, self-binding autoimmune driving Ig) to immune cells via engagement with cell surface antigens (Ag) on the diseased cell and Fc receptors (FcR) expressed on the immune cells.

[0139] FIG. 2A. Depiction of an IgR fusion protein comprising an Immunoglobulin-binding domain (IgBD) and immune cell surface protein-binding domain (ICBD) comprising an immunoglobulin redirector molecule with an optional linker. FIG. 2B. Depiction of an IgR engaging an immunoglobulin binding a diseased cell and redirecting it to an immune cell surface protein. FIG. 2C. Depiction of an IgR comprising two immunoglobulin-binding domains and one immune cell binding domain with optional linkers. FIG. 2D. Depiction of an IgR comprising one immunoglobulin-binding domain and two immune cell binding domains with optional linkers.

[0140] FIG. 3A. Depiction of an IgR comprising a half-life extension domain fused to an immunoglobulin binding domain and one immune cell binding domain with optional linkers. FIG. 3B. Depiction of an IgR comprising a half-life extension domain fused to two immunoglobulin binding domains and one immune cell binding domain with optional linkers. FIG. 3C. Depiction of an IgR comprising a half-life extension domain fused to one immunoglobulin binding domain and two immune cell binding domains with optional linkers.

[0141] FIG. 4A. Depiction of an IgR comprising an immunoglobulin-binding domain fused to an Fc attached to another Fc with a heavy-chain/light chain comprising immune cell binding domain (VH/VL pair attached to their corresponding constant heavy/light chains). FIG. 4B. Depiction of an IgR comprising an immunoglobulin-binding domain fused to an Fc attached to another Fc with a heavy-chain/light chain comprising two immune cell binding domains (one VH/VL pair attached to their corresponding constant heavy and light chains and one VH/VL pair as an ScFv fused to the C-terminus of the constant light chain). FIG. 4C. Depiction of an IgR comprising an immunoglobulin-binding domain fused to an Fc attached to another Fc with a heavy-chain comprising immune cell binding domain (VH/VL pair as an ScFv attached to the N-terminus of a constant heavy chain). FIG. 4D. Depiction of an IgR comprising an immunoglobulin-binding domain fused to an Fc attached to another Fc with a heavy-chain comprising immune cell binding domain and a 2nd immunoglobulin-binding domain (an immunoglobulin-binding domain fused to an VH/VL pair as an ScFv attached to the N-terminus of a constant heavy chain and). FIG. 4E. Depiction of an IgR comprising one immunoglobulin-binding domain fused to the N-terminus of a constant heavy chain, a second immunoglobulin-binding domain fused to the N-terminus of a constant light chain on the same Fc attached to another Fc with a heavy-chain/light chain comprising immune cell binding domain (VH/VL pair attached to their corresponding constant heavy/light chains). FIG. 4F. Depiction of an IgR comprising one immunoglobulin-binding domain fused to the N-terminus of a constant heavy chain via an optional linker, a second immunoglobulin-binding domain fused to the N-terminus of a constant light chain via an optional linker on the same Fc attached to another Fc with a heavy-chain/light chain comprising one immune cell binding domain (VH/VL pair attached to their corresponding constant heavy/light chains) and a second immune cell binding domain fused to the N-terminus of the constant light chain via an optional linker. FIG. 4G. Depiction of an IgR comprising an immunoglobulin-binding domain fused to an Fc via an optional linker and attached to another Fc with a heavy-chain/light chain comprising of immune cell binding domain (VH/VL pair attached to their corresponding constant heavy/light chains) and 2nd immunoglobulin binding domain fused to the C-terminus of the constant light chain via an optional linker. FIG. 4H. Depiction of an IgR comprising an immunoglobulin-binding domain (VH/VL pair attached to their corresponding full length constant heavy/light chains) attached to another Fc with a heavy-chain/light chain comprising of immune cell binding domain (VH/VL pair attached to their corresponding full length constant heavy/light chains). FIG. 4I. Depiction of an IgR comprising two immunoglobulin-binding domains with a first VH/VL pair attached to their corresponding full length constant heavy/light chains and a second VH/VL attached to the N-terminus of the first via an optional linker with it's Fc attached to another Fc with a heavy-chain/light chain comprising of immune cell binding domain (VH/VL pair attached to their corresponding full length constant heavy/light chains). FIG. 4J. Depiction of an IgR comprising two immunoglobulin-binding domains with a first VH/VL pair attached to their corresponding full length constant heavy/light chains) attached to another Fc with a heavy-chain/light chain comprising a second immunoglobulin-binding domains (VH/VL pair attached to their corresponding full length constant heavy/light chains) with a immune cell binding domain attached to the C-terminus of one of the light chains of the immunoglobulin binding domains by an optional linker.

[0142] FIG. 5A Depiction of an IgR comprising a Fab fusion with an immune cell binding domain VH/VL pair attached to their corresponding constant heavy chain 1 and constant light chains and one immunoglobulin binding domain fused to the C-terminus of the constant light chain via an optional linker. FIG. 5B. Depiction of an IgR comprising a Fab fusion with an immune cell binding domain VH/VL pair attached to their corresponding constant heavy chain 1 and constant light chains and one immunoglobulin binding domain fused to the C-terminus of the constant heavy chain and one immunoglobulin domain fused to the C-terminus of the constant light chain via optional linkers. FIG. 5C. Depiction of an IgR comprising a Fab fusion with an immunoglobulin binding domain VH/VL pair attached to their corresponding constant heavy chain 1 and constant light chains and one immune cell binding domain fused to the C-terminus of the constant light chain via an optional linker. FIG. 5D. Depiction of an IgR comprising a Fab fusion with an immunoglobulin binding domain attached to the N-terminus of the constant heavy chain 1, one immune cell binding domain fused to the C-terminus of the constant light chain via an optional linker. FIG. 5E. Depiction of an IgR comprising a Fab fusion with one immunoglobulin binding domain attached to the N-terminus of the constant heavy chain 1, a 2nd immunoglobulin binding domain attached to the N-terminus of the constant light chain and one immune cell binding domain fused to the C-terminus of the constant light chain via an optional linker. FIG. 5F. Depiction of an IgR comprising a Fab fusion with an immunoglobulin binding domain attached to the N-terminus of the constant heavy chain 1, one immune cell binding domain fused to the C-terminus of the constant heavy chain via an optional linker and a 2nd immune cell binding domain fused to the C-terminus of the constant light chain via an optional linker. FIG. 5G. Depiction of an IgR comprising a Fab fusion with one immunoglobulin binding domain attached to the N-terminus of the constant heavy chain 1, a 2nd immunoglobulin binding domain attached to the N-terminus of the constant light chain, one immune cell binding domain fused to the C-terminus of the constant heavy chain via an optional linker and a 2nd immune cell binding domain fused to the C-terminus of the constant light chain via an optional linker. FIG. 5H. Depiction of an IgR comprising a Fab fusion with an immunoglobulin binding domain VH/VL pair attached to their corresponding constant heavy chain 1 and constant light chains and one immune cell binding domain fused to the C-terminus of the constant light chain via an optional linker and a 2nd immune cell binding domain fused to the C-terminus of the constant heavy chain via an optional linker. FIG. 5I. Depiction of an IgR comprising a Fab fusion with two immunoglobulin binding domains with a first VH/VL pair attached to their corresponding constant heavy chain 1 and constant light chains and second VH/VL pair attached to the N-terminus of the first VH/VL pair via an optional linker; and one immune cell binding domain fused to the C-terminus of the constant light chain via an optional linker; and a half-life extension domain fused to the C-terminus of the constant heavy chain via an optional linker. FIG. 5J. Depiction of an IgR comprising a Fab fusion with an immune cell binding domain VH/VL pair attached to their corresponding constant heavy chain 1 and constant light chains and one immunoglobulin binding domain fused to the C-terminus of the constant heavy chain and one immunoglobulin domain fused to the C-terminus of the constant light chain via optional linkers; and with a half-life extension domain attached to the C-terminus of one of the immunoglobulin domains via an optional linker. FIG. 5K. Depiction of an IgR comprising a Fab fusion with an immune cell binding domain VH/VL pair attached to their corresponding constant heavy chain 1 and constant light chains and one immunoglobulin binding domain fused to the N-terminus of the variable heavy chain and one immunoglobulin domain fused to the N-terminus of the variable light chain via optional linkers. FIG. 5L. Depiction of an IgR comprising a Fab fusion with an immune cell binding domain VH/VL pair attached to their corresponding constant heavy chain 1 and constant light chains and one immunoglobulin binding domain fused to the N-terminus of the variable heavy chain via an optional linker; one immunoglobulin domain fused to the N-terminus of the variable light chain via an optional linker; and one immunoglobulin domain fused to the C-terminus of one of the constant chains via an optional linker.

[0143] FIG. 6A. Depiction of an IgR comprising a Fab fusion with an immune cell binding domain VH/VL pair attached to their corresponding constant heavy chain 1 and constant light chains and one immunoglobulin binding domain fused to the C-terminus of the constant light chain via an optional linker and a PEG-lipid covalently attached to the C-terminus of the constant heavy chain 1. FIG. 6B. Depiction of an IgR comprising a Fab fusion with an immunoglobulin binding domain VH/VL pair attached to their corresponding constant heavy chain 1 and constant light chains and one immune cell binding domain fused to the C-terminus of the constant light chain via an optional linker and a PEG-lipid covalently attached to the C-terminus of the constant heavy chain 1. FIG. 6C. Depiction of an IgR comprising a Fab fusion with an immunoglobulin binding domain attached to the N-terminus of the constant heavy chain 1 via an optional linker, one immune cell binding domain VH/VL pair ScFv fused to the C-terminus of the constant light chain via an optional linker and a PEG-lipid covalently attached to the C-terminus of the constant heavy chain 1. FIG. 6D. Depiction of an IgR comprising a Fab fusion with one immunoglobulin binding domain attached to the N-terminus of the constant heavy chain 1 via an optional linker, a 2nd immunoglobulin binding domain attached to the N-terminus of the constant light chain via an optional linker, one immune cell binding domain fused to the C-terminus of the constant light chain via an optional linker and a PEG-lipid covalently attached to the C-terminus of the constant heavy chain 1. FIG. 6E. Depiction of an IgR comprising an immunoglobulin-binding domain fused to the N-terminus of an immune cell binding domain VH/VL pair ScFv and a PEG-lipid covalently attached to the C-terminus of the ScFv. FIG. 6F. Depiction of an IgR comprising a Fab fusion with one immune cell binding domain VH/VL ScFv attached to the N-terminus of the constant heavy chain 1 via an optional linker, a 2nd immune cell binding domain VH/VL ScFv attached to the N-terminus of the constant light chain, one immunoglobulin binding domain fused to the C-terminus of the constant light chain via an optional linker and a PEG-lipid covalently attached to the C-terminus of the constant heavy chain 1. FIG. 6G. Depiction of an IgR comprising a Fab fusion with one immunoglobulin binding domain attached to the N-terminus of the constant heavy chain 1, an immune cell binding domain VH/VL pair ScFv attached to the N-terminus of the constant light chain, a 2nd immune cell binding domain VH/VL pair ScFv fused to the C-terminus of the constant light chain via an optional linker and a PEG-lipid covalently attached to the C-terminus of the constant heavy chain 1.

[0144] FIG. 7A. Depiction of an IgR comprising an Fc-binding domain and T cell receptor complex-binding domain capable of redirecting immunoglobulins to T cells. FIG. 7B. Depiction of FcB/αTCR IgR molecule augmenting Ig mediated effector function against cancer cells by recruiting and driving T cell mediated effector function.

[0145] FIG. 8A, FIG. 8C, FIG. 8E, FIG. 8G, FIG. 8I, FIG. 8K display the SDS-PAGE gels for reducing (R) and non-reducing IgRs. FIG. 8B, FIG. 8D, FIG. 8F, FIG. 8H, FIG. 8J, FIG. 8L display the size exclusion chromatography by high pressure liquid chromatography (HPLC-SEC) chromatograms for IgRs.

[0146] FIG. 9A, FIG. 9C, FIG. 9E, FIG. 9G, FIG. 9I displays the SDS-PAGE gels for reducing (R) and non-reducing IgRs. FIG. 9B, FIG. 9D, FIG. 9F, FIG. 9H, FIG. 9J displays the size exclusion chromatography by high pressure liquid chromatography (HPLC-SEC) chromatograms for IgRs.

[0147] FIG. 10. Depiction of a T cell activation assay using a co-culture of a target cancer cell line and an engineered T cell line, Jurkat NFAT-luc, that expresses luciferase when it's t cell receptors are crosslinked by combining target cell binding antibodies with Fc-binding/T cell receptor binding fusion proteins.

[0148] FIG. 11. Verification of T cell activation assay using co-culture of CD20+ Raji cells and Jurkat NFAT-Luc cells in all wells where cells alone and anti-CD20 Rituximab are negative controls and with anti-CD20/anti-CD3 Mosunetuzumab is a positive control.

[0149] FIG. 12. Verification of T cell activation assay using co-culture of CD20+ Raji cells and Jurkat NFAT-Luc cells in all wells with anti-CD20/anti-CD3 Mosunetuzumab is a positive control.

[0150] FIG. 13. Evaluation of T cell activation from FcγRIIIA/anti-CD3 or FcγRIIIA/anti-TCR fusion proteins combined with and without Rituximab (Rtx) when co-cultured with CD20+ Raji B cells and Jurkat-NFAT-Luc T cells.

[0151] FIG. 14. Evaluation of T cell activation from FcγRIIIA/anti-CD3 fusion with or without half-life extension strategies combined with and without Rituximab (Rtx) when co-cultured with CD20+ Raji B cells and Jurkat-NFAT-Luc T cells.

[0152] FIG. 15. Evaluation of T cell activation from FcγRIIIA/anti-CD3 or anti-Fc/anti-CD3 fusions combined with and without Rituximab when co-cultured with CD20+ Raji B cells and Jurkat-NFAT-Luc T cells.

[0153] FIG. 16. Evaluation of T cell activation from FcγRIIIA/anti-CD3 or FcγRIIIA/anti-TCR fusion proteins combined with Trastuzumab (Tras) or Rituximab (Rtx) when co-cultured with HER2+ SKBR3 breast cancer cells and Jurkat-NFAT-Luc T cells.

[0154] FIG. 17. Evaluation of T cell activation from FcγRIIIA/anti-CD3 fusion with or without half-life extension strategies combined with Trastuzumab (Tras) or Rituximab (Rtx) when co-cultured with HER2+ SKBR3 breast cancer cells and Jurkat-NFAT-Luc T cells.

[0155] FIG. 18. Evaluation of T cell activation from FcγRIIIA/anti-CD3 or anti-Fc/anti-CD3 fusions combined with Trastuzumab (Tras) or Rituximab (Rtx) when co-cultured with HER2+ SKBR3 breast cancer cells and Jurkat-NFAT-Luc T cells.

[0156] FIG. 19A and FIG. 19B. Display of SDS-PAGE gels images for Reduced (R) and Non-reduced (NR) IgRs from Example 18 and Marker (M) in kDa.

[0157] FIG. 20. Display of chromatograms from size exclusion chromatography using a high pressure liquid chromatography system (HPLC-SEC) for IgRs from Example 18.

[0158] FIG. 21. Evaluation of T cell activation for anti-CD3 IgRs combined with Rituximab (Rtx) or Trastuzumab (Trz) when co-cultured with CD20+ Raji B cells and Jurkat-NFAT-Luc T cells in Example 18.

[0159] FIG. 22A and FIG. 22B. Display of SDS-PAGE gels images for Reduced (R) and Non-reduced (NR) IgRs from Example 19 and Marker (M) in kDa.

[0160] FIG. 23. Display of chromatograms from size exclusion chromatography using a high pressure liquid chromatography system (HPLC-SEC) for IgRs from Example 19.

[0161] FIG. 24. Evaluation of T cell activation for anti-CD3 IgRs combined with Rituximab (Rtx) or Trastuzumab (Trz) when co-cultured with CD20+ Raji B cells and Jurkat-NFAT-Luc T cells in Example 19.

[0162] FIG. 25. Evaluation of T cell activation for anti-CD3 IgRs combined with Rituximab (Rtx) or Trastuzumab (Trz) or Rituximab and Trastuzumab when co-cultured with CD20+ Raji B cells and Jurkat-NFAT-Luc T cells in Example 20.

[0163] FIG. 26A and FIG. 26B. Display of SDS-PAGE gels images for Reduced (R) and Non-reduced (NR) IgRs from Example 21 and Marker (M) in kDa.

[0164] FIG. 27. Display of chromatograms from size exclusion chromatography using a high pressure liquid chromatography system (HPLC-SEC) for IgRs from Example 21.

[0165] FIG. 28. Evaluation of T cell activation assay for anti-CD3 IgRs combined with Rituximab (Rtx) or Trastuzumab (Trz) or Rituximab and Trastuzumab when co-cultured with CD20+ Raji B cells and Jurkat-NFAT-Luc T cells in Example 21

[0166] FIG. 29A and FIG. 29B display of SDS-PAGE gels images for Reduced (R) and Non-reduced (NR) IgRs from Example 22 and Marker (M) in kDa.

[0167] FIG. 30. Display of chromatograms from size exclusion chromatography using a high pressure liquid chromatography system (HPLC-SEC) for IgRs from Example 22.

[0168] FIG. 31. Evaluation of T cell activation for anti-CD3 IgRs combined with Rituximab (Rtx) or Trastuzumab (Trz) when co-cultured with CD20+ Raji B cells and Jurkat-NFAT-Luc T cells in Example 22.

[0169] FIG. 32. Evaluation of T cell activation for anti-CD3 IgRs combined with Rituximab (Rtx) or Trastuzumab (Trz) when co-cultured with CD20+ Raji B cells and Jurkat-NFAT-Luc T cells in Example 22.

[0170] FIG. 33. Evaluation of T cell activation for anti-CD3 IgRs combined with Rituximab (Rtx) or Trastuzumab (Trz) or Rituximab and Trastuzumab when co-cultured with CD20+ Raji B cells and Jurkat-NFAT-Luc T cells in Example 22.

[0171] FIG. 34. Evaluation of T cell activation for anti-CD3 IgRs alone or combined anti-CD3 OKT3 mIgG2a; or Rituximab (Rtx) alone; or anti-CD3 OKT3 mIgG2a alone when co-cultured with CD20+ Raji B cells and Jurkat-NFAT-Luc T cells in Example 22.

[0172] FIG. 35. Evaluation of T cell co-stimulation for anti-CD28 IgRs combined with Rituximab (Rtx) or Trastuzumab (Trz) when co-cultured with CD20+ Raji B cells and Jurkat-NFAT-Luc T cells in wells pre-coated with 1 μg/mL OKT3 in Example 22.

[0173] FIG. 36A, FIG. 36B, and FIG. 36C display of SDS-PAGE gels images for Reduced (R) and Non-reduced (NR) IgRs from Example 23 and Marker (M) in kDa.

[0174] FIG. 37A and FIG. 37B display of chromatograms from size exclusion chromatography using a high pressure liquid chromatography system (HPLC-SEC) for IgRs from Example 23.

[0175] FIG. 38. Evaluation of T cell activation for anti-CD3 IgRs combined with Rituximab (Rtx) or Trastuzumab (Trz) or Rituximab and Trastuzumab when co-cultured with CD20+ Raji B cells and Jurkat-NFAT-Luc T cells in Example 23.

[0176] FIG. 39. Evaluation of T cell activation for anti-CD3 IgRs combined with Rituximab (Rtx) or Trastuzumab (Trz) or Rituximab and Trastuzumab when co-cultured with CD20+ Raji B cells and Jurkat-NFAT-Luc T cells in Example 23.

[0177] FIG. 40. Evaluation of T cell activation for anti-CD3 IgRs combined with Rituximab (Rtx) or Trastuzumab (Trz) or Rituximab and Trastuzumab when co-cultured with CD20+ Raji B cells and Jurkat-NFAT-Luc T cells in Example 23.

[0178] FIG. 41A, FIG. 41B, and FIG. 41C display of SDS-PAGE gels images for Reduced (R) and Non-reduced (NR) IgRs from Example 24 and Marker (M) in kDa.

[0179] FIG. 42A and FIG. 42B display of chromatograms from size exclusion chromatography using a high pressure liquid chromatography system (HPLC-SEC) for IgRs from Example 24.

[0180] FIG. 43. Evaluation of T cell activation for anti-CD3 IgRs combined with Rituximab (Rtx) or Trastuzumab (Trz) or Rituximab and Trastuzumab when co-cultured with CD20+ Raji B cells and Jurkat-NFAT-Luc T cells in Example 24.

[0181] FIG. 44. Evaluation of T cell co-stimulation for anti-CD28 IgRs combined with Rituximab (Rtx) or Trastuzumab (Trz) when co-cultured with CD20+ Raji B cells and Jurkat-NFAT-Luc T cells in wells pre-coated with 1 μg/mL OKT3 in Example 24.

[0182] FIG. 45. Evaluation of T cell co-stimulation for anti-CD137 IgRs combined with Rituximab (Rtx) or Trastuzumab (Trz) or Rituximab and Trastuzumab when co-cultured with CD20+ Raji B cells and HEK-Luc-CD137 cells in Example 24.

[0183] FIG. 46. Evaluation of T cell co-stimulation for anti-CD89 IgRs combined with OKT3 or Trastuzumab (Trz) or OKT3 and Trastuzumab when co-cultured with Jurkat-NFAT-Luc T cells and CHO-K1-CD89 cells in Example 24.

[0184] FIG. 47. Display of SDS-PAGE gels images for Reduced (R) and Non-reduced (NR) IgRs from Example 25 and Marker (M) in kDa.

[0185] FIG. 48A and FIG. 48B display of chromatograms from size exclusion chromatography using a high pressure liquid chromatography system (HPLC-SEC) for IgRs from Example 25.

### DETAILED DESCRIPTION OF THE INVENTION

[0186] The field of the invention generally relates to immunology, and more specifically relates to heterologous polypeptides or multimeric proteins, and nucleic acids encoding the same, comprising at least one immunoglobulin-binding domain and at least immune cell surface polypeptide or protein binding domain for use in modulating disease such as cancer, autoimmunity, organ rejection, pathogenic infections such as viruses, bacteria, parasites or fungus.

[0187] The present invention relates to but is not limited to, heterologous polypeptides or multimeric proteins, comprising an immunoglobulin-binding domain with affinity and specificity for a portion of an immunoglobulin molecule (Ig); and at least one domain with affinity and specificity for at least one extracellular polypeptide present on immune cells.

[0188] The present invention relates to heterologous polypeptides or multimeric proteins and nucleic acids encoding the same that comprises at least one immunoglobulin-binding domain and at least one immune cell surface protein-binding domain thus creating an Immunoglobulin Redirector (IgR) molecules capable of engaging immune cells and modulating cellular activity such as effector function or suppression. IgRs of the invention can be used as a monotherapy or in combination with one or more standard, current or experimental therapeutics. such as cancer, immune disorders, or pathogenic infections.

[0189] Antibody-based or antibody-fragment based immunotherapies such as plasma derived intravenous immunoglobulin (IVIG), polyclonal antibodies, monoclonal antibodies, antibody fusion proteins, single chain variable fragment (ScFv), a domain antibody (ex a VHH or nanobody) and antibody drug conjugates can treat a wide array of diseases, particularly cancer, inflammatory diseases and infectious diseases. Such therapies may depend on diseased cell elimination by: engagement an Fc-receptor on an effector cell; and recognizing cell surface molecules (for example overexpressed protein on a cancer cell or virus or virus components budding from an infected cell) that is differentially present relative to a normal cell. Binding of an antibody based immunotherapy to a diseased cell can lead to cell death via various mechanisms, for example, antibody dependent cell mediated cytotoxicity (ADCC), antibody dependent cell mediated phagocytosis (ADCP), antibody dependent Neutrophil Extracellular Traps (NETosis), complement dependent cytotoxicity (CDC), or direct cytotoxic activity of the payload from an antibody drug conjugate (ADC). By combining IgRs with antibody based therapies, new cell types and cellular functions can be elicited. Additionally, IgRs can be delivered as monotherapies and rely on a patient's own antibodies to modulate disease.

[0190] Immunotherapy including but not limited to cell-based therapies, antibody therapies, cytokines, chemokines, growth factors and receptor or ligand fusions is used to provoke an immune response towards diseased cells, tissues or organs while sparing healthy cells, tissues or organs. Disease areas using immunotherapy include but is not limited to cancer, autoimmunity, inflammation, alloimmunity and infectious disease.

### Definitions

[0191] Unless defined otherwise, all terms of art, notations and other technical and scientific terms or terminology used herein are intended to have the same meaning as is commonly understood by one of ordinary skill in the art to which the claimed subject matter pertains. In some cases, terms with commonly understood meanings are defined herein for clarity and/or for ready reference, and the inclusion of such definitions herein should not necessarily be construed to represent a substantial difference over what is generally understood in the art.

[0192] As used herein, the singular forms “a,” “an,” and “the” include plural referents unless the context clearly dictates otherwise. For example, “a” or “an” means “at least one” or “one or more.” It is understood that aspects and variations described herein include “consisting” and/or “consisting essentially of” aspects and variations.

[0193] Throughout this disclosure, various aspects of the claimed subject matter are presented in a range format. It should be understood that the description in range format is merely for convenience and brevity and should not be construed as an inflexible limitation on the scope of the claimed subject matter. Accordingly, the description of a range should be considered to have specifically disclosed all the possible sub-ranges as well as individual numerical values within that range. For example, where a range of values is provided, it is understood that each intervening value, between the upper and lower limit of that range and any other stated or intervening value in that stated range is encompassed within the claimed subject matter. The upper and lower limits of these smaller ranges may independently be included in the smaller ranges, and are also encompassed within the claimed subject matter, subject to any specifically excluded limit in the stated range. Where the stated range includes one or both of the limits, ranges excluding either or both of those included limits are also included in the claimed subject matter. This applies regardless of the breadth of the range.

[0194] The term “about” as used herein refers to the usual error range for the respective value readily known to the skilled person in this technical field. Reference to “about” a value or parameter herein includes (and describes) embodiments that are directed to that value or parameter per se. For example, description referring to “about X” includes description of “X”. The term “about” can also encompass variations, which can be up to ±5%, but can also be ±4%, 3%, 2%, 1%, etc. Whether or not modified by the term “about,” the claims include equivalents to the quantities.

[0195] As used herein, “domain” (typically a sequence of three or more, generally 5 or 7 or more amino acids, such as 10 to 200 amino acid residues) refers to a portion of a molecule, such as a protein or encoding nucleic acid, that is structurally and/or functionally distinct from other portions of the molecule and is identifiable. For example, domains include those portions of a polypeptide chain that can form an independently folded structure within a protein made up of one or more structural motifs and/or that is recognized by virtue of a functional activity, such as binding activity. A protein can have one, or more than one, distinct domains. For example, a domain can be identified, defined or distinguished by homology of the primary sequence or structure to related family members, such as homology to motifs. In another example, a domain can be distinguished by its function, such as an ability to interact with a biomolecule. A domain independently can exhibit a biological function or activity such that the domain independently or fused to another molecule can perform an activity, such as, for example binding. A domain can be a linear sequence of amino acids or a non-linear sequence of amino acids. Many polypeptides contain a plurality of domains. For exemplification herein, definitions are provided, but particular domains can be recognized in some aspects by name. If needed appropriate software can be employed to identify domains.

[0196] An “immunoglobulin heavy chain”, as used herein, is a polypeptide that contains at least a portion of the antigen binding domain of an immunoglobulin and at least a portion of a variable region of an immunoglobulin heavy chain or at least a portion of a constant region of an immunoglobulin heavy chain. Thus, the immunoglobulin derived heavy chain has significant regions of amino acid sequence with a member of the immunoglobulin gene superfamily. For example, the heavy chain in a Fab fragment is an immunoglobulin-derived heavy chain.

[0197] An “immunoglobulin light chain”, as used herein, is a polypeptide that contains at least a portion of the antigen binding domain of an immunoglobulin and at least a portion of a variable region of an immunoglobulin light chain or at least a portion of a constant region of an immunoglobulin light chain. Thus, the immunoglobulin derived light chain has significant regions of amino acid sequence with a member of the immunoglobulin gene superfamily.

[0198] An “Fc region” or “Fc domain”, as used herein, refers to the crystallizable fragment which is the region of an antibody with interacts with the cell surface receptors (Fc receptors).

[0199] An “immunoglobulin molecule”, as used herein, is a protein containing the immunologically-active portions of an immunoglobulin heavy chain and immunoglobulin light chain covalently coupled together and capable of specifically combining with antigen. For example, the immunoglobulin molecules can be IgG, IgE, IgD, IgA, IgM and IgY. For example, the subclasses of the immunoglobulin molecules can be IgG1, IgG2, IgG3, IgG4, IgA1, and IgA2.

[0200] In some aspects, the specific dose level for any particular subject or patient may depend upon a variety of factors including the activity of the specific compound employed, the age, body weight, general health, route of administration, severity of the disorder, rate of excretion. The therapeutically effective amount for a given situation can be readily determined by routine experimentation and is within the skill and judgment of the ordinary clinician. The terms “therapeutically effective amount” and “therapeutically effective dose” are used interchangeably herein to refer to an amount of a compound that results in prevention or amelioration of systems in a patient or a desired biological outcome. The terms “subject” and “patient” are used interchangeably herein to refer to a mammal, such as a human, non-human primate (e.g., a baboon, an orangutan, a monkey, a gorilla), or a non-primate mammal (e.g., a mouse, a rat, a dog, a pig).

[0201] The immune cell surface protein binding domain can be any suitable molecule that can bind the receptor, such as a small organic molecule, an antigen-binding portion of an antibody (e.g., a Fab fragment, a Fab′ fragment, a F(ab′)2 fragment, a scFv fragment, a Fv fragment, a dsFv diabody, a dAb fragment, a Fd′ fragment, a Fd fragment, or an isolated complementarity determining region (CDR) region), an antibody mimetic (e.g., an aptamer, an affibody, an affilin, an affimer, an anticalin, an avimer, a DARPin, and the like), a nucleic acid, lipid, and the like.

[0202] The IgR can comprise any moiety that inhibits the ability of an immunoglobulin to bind and/or activate its receptor. The blocking moiety can inhibit the ability of the immunoglobulin to bind and/or activate its receptor sterically blocking and/or by noncovalently binding to the immunoglobulin. Examples of suitable blocking moieties include the full length or a immunoglobulin-binding fragment or mutein of the cognate receptor of the immunoglobulin. Antibodies and fragments thereof including, a polyclonal antibody, a recombinant antibody, a human antibody, a humanized antibody a single chain variable fragment (scFv), single-domain antibody such as a heavy chain variable domain (VH), a light chain variable domain (VL) and a variable domain of camelid-type nanobody (VHH), a dAb and the like that bind the immunoglobulin can also be used. Other suitable antigen-binding domain that bind the immunoglobulin can also be used, include non-immunoglobulin proteins that mimic antibody binding and/or structure such as, anticalins, affilins, affibody molecules, affimers, affitins, alphabodies, avimers, DARPins, fynomers, kunitz domain peptides, monobodies, and binding domains based on other engineered scaffolds such as SpA, GroEL, fibronectin, lipocallin and CTLA4 scaffolds. Further examples of suitable blocking polypeptides include polypeptides that sterically inhibit or block binding of the immunoglobulin to its cognate receptor.

[0203] Advantageously, such moieties can also function as half-life extending elements. For example, a peptide that is modified by conjugation to a water-soluble polymer, such as PEG, can sterically inhibit or prevent binding of the immunoglobulin to its receptor. Polypeptides, or fragments thereof, that have long serum half-lives can also be used, such as serum albumin (human serum albumin), immunoglobulin Fc, transferrin and the like, as well as fragments and muteins of such polypeptides.

[0204] Antibodies and antigen-binding domains that bind to, for example, a protein with a long serum half-life such as HSA, immunoglobulin or transferrin, or to a receptor that is recycled to the plasma membrane, such as FcRn or transferrin receptor, can also inhibit the immunoglobulin, particularly when bound to their antigen. Examples of such antigen-binding polypeptides include a single chain variable fragment (scFv), single-domain antibody such as a heavy chain variable domain (VH), a light chain variable domain (VL) and a variable domain of camelid-type nanobody (VHH), a dAb and the like. Other suitable antigen-binding domain that bind the immunoglobulin can also be used, include non-immunoglobulin proteins that mimic antibody binding and/or structure such as, anticalins, affilins, affibody molecules, affimers, affitins, alphabodies, avimers, DARPins, fynomers, kunitz domain peptides, monobodies, and binding domains based on other engineered scaffolds such as SpA, GroEL, fibronectin, lipocallin and CTLA4 scaffolds.

[0205] The engineered scaffold can comprise a sdAb, a scFv, a Fab, a VHH, a fibronectin type III domain, immunoglobulin-like scaffold, DARPin, cystine knot peptide, lipocalin, three-helix bundle scaffold, protein G-related albumin-binding module, or a DNA or RNA aptamer scaffold.

[0206] The serum half-life extension element can also be antigen-binding polypeptide that binds to a protein with a long serum half-life such as serum albumin, transferrin and the like. Examples of such polypeptides include antibodies and fragments thereof including, a polyclonal antibody, a recombinant antibody, a human antibody, a humanized antibody a single chain variable fragment (scFv), single-domain antibody such as a heavy chain variable domain (VH), a light chain variable domain (VL) and a variable domain of camelid-type nanobody (VHH), a dAb and the like. Other suitable antigen-binding domain include non-immunoglobulin proteins that mimic antibody binding and/or structure such as, anticalins, affilins, affibody molecules, affimers, affitins, alphabodies, avimers, DARPins, fynomers, kunitz domain peptides, monobodies, and binding domains based on other engineered scaffolds such as SpA, GroEL, fibronectin, lipocallin and CTLA4 scaffolds. Further examples of antigen-binding polypeptides include a ligand for a desired receptor, a ligand-binding portion of a receptor, a lectin, and peptides that binds to or associates with one or more target antigens.

[0207] The binding moieties can be any kind of polypeptides. For example, in certain instances the binding moieties are natural peptides, synthetic peptides, or fibronectin scaffolds, or engineered bulk serum proteins. The bulk serum protein comprises, for example, albumin, fibrinogen, or a globulin. In some embodiments, the binding moieties are engineered scaffolds. Engineered scaffolds comprise, for example, sdAb, a scFv, a Fab, a VHH, a fibronectin type III domain, immunoglobulin-like scaffold (Halaby et al., 1999), DARPin, cystine knot peptide, lipocalin, three-helix bundle scaffold, protein G-related albumin-binding module, or a DNA or RNA aptamer scaffold.

[0208] In some embodiments the heterologous polypeptide or multimeric protein and nucleic acids encoding the same, comprises:
[0209] (a) at least one immunoglobulin-binding domain
[0210] (b) and at least one immune cell surface protein-binding domain

[0211] In some embodiments the heterologous polypeptide or multimeric protein and nucleic acids encoding the same, comprises:
[0212] (a) at least one immunoglobulin-binding domain wherein the immunoglobulin binding domain is an antigen-binding domain, antibody or antigen-binding fragment, including but not limited to ScFv, Fab, a single domain antibody, VHH, nanobody, avimer, a Fab, (Fab)2, a Kunitz domain, a small modular immunopharmaceutical (SMIP), an adnectin, an affibody, a DARPin, an anticalin or a synthetic peptide such as Fc-III their derivatives or analogs thereof with affinity and specificity for one or more immunoglobulin isotypes and derivatives thereof, including but not limited to IgG, IgA, IgM, IgE, IgD
[0213] (b) and at least one immune cell surface protein-binding domain

[0214] In various embodiments, an immunoglobulin-binding domain is an antigen-binding domain, antibody or antigen-binding fragment including derivatives and analogs thereof that is fully human or humanized.

[0215] In some embodiments at least one immunoglobulin-binding domain is an antigen-binding domain, antibody or antigen-binding fragment including derivatives and analogs thereof with affinity and specificity for the Fc, Fc-glycan, hinge, constant heavy chain including CH1, CH2, CH3, CH4, constant light chain kappa, constant light chain lambda, variable heavy chain framework region, variable light chain framework region, Fab or (Fab)2 of one or more immunoglobulin isotypes including IgG, IgA, IgM, IgE and IgD.

[0216] Immunoglobulin binding antibodies have been previously reported (Hamilton & Morrison, 1993), (Hermans et al., 2015), (Hermans et al., 2017), (Bonvin et al., 2015), (Belin et al., 2004; Carrier et al., 1995) (Leonard et al., 2022) and (Ji Yi H K, 2021).

[0217] In some embodiments the immunoglobulin-binding domain is anti-Fc VHH (SEQ ID NO: 48), anti-IgG comprising VH/VL pair 17F12 (SEQ ID NO: 134, SEQ ID NO: 135), anti-CH1 VHH (SEQ ID NO: 130) or the CDRs therein. In other embodiments the immunoglobulin-binding domain is derived from anti-IgG clone HG2-25, 8E11, 8F1, NH3/130.5.2, NH3/15.8, HP6045, MS-278, anti-IgG Fc MK1A6, JDC-10, H2, 6F11C8, AbD27686, R10Z8E9, M1310G05, 97924, PABZ-080, RF-AN, A4, NA6, HP6017 (SEQ ID NO: 288, SEC ID: 290), HP6070, GG-7, Fc-III peptide (Univ, 2010), clone EM-07; anti-IgA clones in (Chang et al., 2017), H15A43, B35064B, A9604D2; anti-IgM clones in (Frey et al., 2018), SA-DA4, M15/8, B481; anti-IgE clones HuMaE11/Omalizumab, TES-C21; anti-IgD clones IGD26, IADB6; anti-lambda clones N10/2, JDC-12; anti-kappa clones NH3/41.34, SB81A, anti-IgG Fab clone 4A11, anti-IgG CH2 clone 8A4.

[0218] In some embodiments at least one immunoglobulin-binding domain is an antigen-binding domain, antibody or antigen-binding fragment including derivatives and analogs thereof with affinity and specificity for the Fc region of one or more immunoglobulin isotypes including IgG, IgA, IgM, IgE and IgD and blocks Fc receptor binding to the Fc region of one or more immunoglobulin isotypes including IgG, IgA, IgM, IgE and IgD.

[0219] In some embodiments at least one immunoglobulin-binding domain is an antigen-binding domain, antibody or antigen-binding fragment including derivatives and analogs thereof with affinity and specificity for the Fc region of one or more immunoglobulin isotypes including IgG, IgA, IgM, IgE and IgD and does not block Fc receptor binding to the Fc region of one or more immunoglobulin isotypes including IgG, IgA, IgM, IgE and IgD.

[0220] Fc receptors are classified based on the isotype of the antibody to which it is able to bind. For example, Fc-gamma receptors (FcγR) generally bind to IgG antibodies, such as one or more subtype thereof (i.e., IgG1, IgG2, IgG3, IgG4); Fc-alpha receptors (FcαR) generally bind to IgA antibodies; Fc-alpha/mu (Fcα/μR) receptors generally bind IgA and IgM; Fc-epsilon receptors (FcεR) generally bind to IgE antibodies; and IgDR receptors generally bind to IgD. Additionally, other Fc receptors have been reported for various isotypes such as Fc neonatal receptor (FcRn) capable of binding IgG (Raghavan et al., 1994); FcRL4 and FcRL5 capable of binding IgG and IgA (Wilson et al., 2012), DC-SIGN capable of binding IgG (Anthony et al., 2008), TRIM21 capable of binding IgG (Keeble et al., 2008), MMR capable of binding IgG glycans (Dong et al., 1999), Dectin-1 and Dectin-2 capable of binding glycans on IgG (Boesch et al., 2014; Karsten et al., 2012) mannose binding lectin 2 (MBL2) capable of binding glycans on Ig (Arnold et al., 2006), C1q capable of binding IgG, IgM and IgA; and pIgR capable of binding IgA and IgM. In some embodiments, the Fc-binder is an Fc receptor comprising an Fc-gamma receptor, an Fc-alpha receptor, an Fc-epsilon receptor, an Fc-alpha/mu receptor. Examples of Fc-gamma receptors include, without limitation, CD64A (FcγRI), CD64B (FcγRI), CD64C (FcγRI), CD32A (FcγRIIA in including H131 and R131 alloytypes), CD32B (FcγRIIB), CD32C (FcγRIIC), CD16A (FcγRIIIA, including V176 and F158 allotypes also referred to the V158 and F158 allotypes excluding leader sequence or L66H mutation (de Vries et al., 1996), and CD16B (FcγRIIIB including SH, NA1, NA2 allotypes). An example of an Fc-alpha receptor is FcαR1 (CD89). Examples of Fc-epsilon receptors include, without limitation, Fc∈RI and Fc∈RII/CD23.

[0221] Engagement of Fc receptors on innate and adaptive immune cells and tissue specific cells can mediate various cellular functions via engagement with the Fc region of immunoglobulin (Ig) such as IgG, IgA, IgE, IgM and IgD. Ig-Fc can bind to Fc receptors to varying degrees depending on Isotype, subclass, allotype, glycosylation and via point mutations. IgG can bind activating FcγR such as CD16 (FcγRIIIa or FcγRIIIb), CD32A or CD32C (FcγRIIa or FcγRIIc), CD64 (FcγRI), C1q and mediate cellular functions such as antigen presentation, internalization, superoxide generation, ADCC, phagocytosis, cytokine secretion, NETosis, adhesion induction, respiratory burst, degranulation, complement fixation and apoptosis. IgG can bind inhibitory FcγR such as CD32B (FcγRIIb) and can mediate internalization and downregulation of B cells, mast cells, macrophages and NK cells (Boesch et al., 2015). IgG binds FcRn in a pH dependent manner and can mediate internalization, IgG transport and phagocytosis. Additional IgG Fc receptors such as complement C1q, FcRL5, pIgR and DC-SIGN have been shown to bind the Fc domain to varying degrees (Boesch et al., 2014). IgA can bind pIgR, FcαRI, Fcα/μR, C1q and can mediate functions such as transcytosis, phagocytosis, ADCC, oxidative burst, cytokine production, downregulation of TGFb, antigen presentation, complement fixation and immune complex trapping (PMID 25700208). IgM can bind pIgR, Fcα/μR, C1q and can mediate functions such as transcytosis, antigen presentation, immune complex trapping and complement fixation. IgE can bind FcεRI and FcεRII and mediate functions such as immune cell modulation, internalization, antigen trapping, antigen presentation, histamine, cytokine production and cytotoxicity (Delespesse et al., 1989; Shin & Greer, 2015). IgD can bind IgDR and can mediate basophil stimulation, release of immune activating, proinflammatory and antimicrobial mediators (Chen & Cerutti, 2011). Selection of FcγR type and variants by allotype, amino acid mutants, domain swap fusions, modified glycosylation sites and glycoforms can modify affinity and IgG subclass specificity as previously shown (“The Second and Third Extracellular Domains of FcγRI (CD64) Confer the Unique High Affinity Binding of IgG2a,” 1998)(Hulett & Hogarth, 1998; “The Second and Third Extracellular Domains of FcγRI (CD64) Confer the Unique High Affinity Binding of IgG2a,” 1998)(Oganesyan et al., 2015)(Website, n.d.-a)(Shibata-Koyama et al., 2009). Possible FcγR variants with enhanced affinity or modified IgG subclass specificity are exhibited in Example 10.

[0222] The immunoglobulin binding domain of the heterologous polypeptides and multimeric proteins described herein includes Fc-binders or polypeptides capable of binding the Fc portion of an immunoglobulin (Ig) molecule (example, IgG, IgA, IgM, IgE or IgD), Suitable Fc-binders may be derived from naturally occurring proteins such as mammalian Fc receptors, certain bacterial proteins such as Protein A or Protein G and virus proteins such as TspB (Müller et al., 2013), gE (Para et al., 1980), gI (Dubin et al., 1990), gpI (Litwin et al., 1992), FcγR-like HCV core protein (Namboodiri et al., 2007), gp34, gp68, gpRL13, gp95, fcr-1 (Corrales-Aguilar et al., 2014). Additionally, Fc-binders may be synthetic polypeptides engineered specifically to bind the Fc portion of any of the Ig molecules described herein with high affinity and specificity.

[0223] In some embodiments, the Fc-binder is an extracellular ligand-binding domain of a mammalian Fc receptor. As used herein, an “Fc receptor” is a cell surface bound receptor that is expressed on the surface of many tissue and immune cells (including endothelial cells, epithelial cells, Langerhans, B cells, dendritic cells, natural killer (NK) cells, macrophage, monocytes, myeloid progenitor cells, platelets, neutrophils, mast cells, polymorphonuclear leukocytes, syncytiotrophoblasts, basophils and eosinophils) and exhibits binding specificity to the Fc domain of an antibody. Fc receptors are typically comprised of immunoglobulin (Ig)-like domains with binding specificity to an Fc (fragment crystallizable) portion of an antibody. In some instances, binding of an Fc receptor to an Fc portion of the antibody may mediate effector functions such as antibody dependent cell-mediated cytotoxicity (ADCC).

[0224] The Fc receptor used for constructing a heterologous polypeptide or multimeric protein as described herein may be a naturally-occurring polymorphism variant (e.g., the CD16A V158 and F158 variants or CD16B NA1, NA2, SH variants), which may have increased or decreased affinity to Fc as compared to a wild-type counterpart. Alternatively, the Fc receptor may be a functional variant of a wild-type counterpart, which carry one or more mutations (e.g., up to 10 amino acid residue substitutions) that alter the binding affinity to the Fc portion of an Ig molecule. In some instances, the mutation may alter the glycosylation pattern of the Fc receptor and thus the binding affinity to Fc. In some embodiments, the point mutation or mutations of an Fc receptor ablates an enzyme cleavage site such as the ADAM17 cleavage site on FcγR3A and FcγR3B as performed in FcγR3AV-S197P, SEQ ID NO: 23, FcγR3AF-S197P SEQ ID NO: 271, FcγR3B-NA1-S197P SEQ ID NO: 272, FcγR3B-NA2-S197P SEQ ID NO: 273, FcγR3B-SH-S197P SEQ ID NO: 274. Optionally, some or all of an enzyme cleavage site such as the ADAM17 cleavage site can be removed but shortening the Fc receptor sequence as performed in FcγR3AV-short SEQ ID NO: 3, FcγR3AF-short SEQ ID NO: 4, FcγR3B-NA1-short, SEQ ID NO: 275, FcγR3B-NA2-short, SEQ ID NO: 276, FcγR3B-SH-short, SEQ ID NO: 277.

[0225] In some embodiments the heterologous polypeptide or multimeric protein and nucleic acids encoding the same, comprises:
[0226] (a) at least one immunoglobulin-binding domain derived from an Fc receptor including but not limited to FcγRIIIa, FcγRIIIa with amino acids LVGSKNV in domain 2 replaced by MGKHRY, FcγRIV, FcγRIIIb, FcγRIIIb with amino acids LVGSKNV in domain 2 replaced by MGKHRY, FcγRIIa, FcγRIIc, FcγRIIb, FcγRI, FcγRI with domain 3 removed, FcRL5, pIgR, FcαRI, Fcα/μR, FcμR, FcεRI, FcεRII, FcRn or TRIM21 including allotypes, derivatives and analogs thereof
[0227] (b) and at least one immune cell surface protein-binding domain

[0228] In some embodiments the heterologous polypeptide or multimeric protein and nucleic acids encoding the same, comprises:
[0229] (a) at least one immunoglobulin-binding domain derived from an Fc receptor wherein a point mutation or mutations of an Fc receptor may ablate an enzyme cleavage site such as the ADAM17 cleavage site
[0230] (b) Optionally, in the Fc receptor, some or all of an enzyme cleavage site such as the ADAM17 cleavage site has been removed
[0231] (c) and at least one immune cell surface protein-binding domain

[0232] In some embodiments the heterologous polypeptide or multimeric protein and nucleic acids encoding the same, comprises:
[0233] (a) at least one immunoglobulin-binding domain is derived from an Fc receptor comprising FcγR3AV-S197P, SEQ ID NO: 23, FcγR3AF-S197P SEQ ID NO: 271, FcγR3B-NA1-S197P SEQ ID NO: 272, FcγR3B-NA2-S197P SEQ ID NO: 273, FcγR3B-SH-S197P SEQ ID NO: 274 including any allotypes, derivatives and analogs thereof.
[0234] (b) Optionally, is derived from an Fc receptor comprising FcγR3AV-short SEQ ID NO: 3, FcγR3AF-short SEQ ID NO: 4, FcγR3B-NA1-short, SEQ ID NO: 275, FcγR3B-NA2-short, SEQ ID NO: 276, FcγR3B-SH-short, SEQ ID NO: 277 including any allotypes, derivatives and analogs thereof.
[0235] (c) and at least one immune cell surface protein-binding domain

[0236] In some embodiments the heterologous polypeptide or multimeric protein and nucleic acids encoding the same, comprises:
[0237] (a) at least one immunoglobulin-binding domain derived from an Fc receptor including but not limited to FcγRIIIa V158 SEQ ID NO: 1, FcγRIIIa-short V158 SEQ ID NO: 3, FcγRIIIa F158 SEQ ID NO: 2, FcγRIIIa-short F158 SEQ ID NO: 4, FcγRIV SEQ ID NO: 8, FcγRIIIb NA1 SEQ ID NO: 6, FcγRIIIb NA2 SEQ ID NO: 7, FcγRIIIb SH SEQ ID NO: 5, FcγRIIa H131 SEQ ID NO: 9, FcγRIIa R131 SEQ ID NO: 10, FcγRIIb/c SEQ ID NO: 11, FcγRI SEQ ID NO: 12, FcRL5 SEQ ID NO: 13, pIgR SEQ ID NO: 14, FcαRI SEQ ID NO: 15, Fcα/μR SEQ ID NO: 16, FcμR SEQ ID NO: 17, FcεRI SEQ ID NO: 18, FcεRII SEQ ID NO: 19, FcRn SEQ ID NO: 20 or c1q including any allotypes, derivatives and analogs thereof.
[0238] (b) and at least one immune cell surface protein-binding domain

[0239] In some embodiments at least one immunoglobulin-binding domain derived from a bacterial or virus Fc receptor including but not limited to Protein A, Protein G or ProteinA/G, TspB, gE, gI, gpI, FcγR-like HCV core protein, gp34, gp68, gpRL13, gp95, fcr-1 including derivatives and analogs thereof.

[0240] Antibody-based immune checkpoint pathway and co-stimulation modulators have begun to provide new immunotherapeutic approaches for treating cancer (for example checkpoint inhibition by binding PD1, PDL1, CTLA4, OX40, TIM3, LAG3, TIGIT, CD47; co-stimulation by binding CD137, CD28, CD2, CD7; and inflammatory diseases by suppressing immune cell activation by binding SIRP1α, CD11a, CD18, CD80, CD86, and PD1.

[0241] Multispecific agents that bind tumor associated antigens or tumor associated antigen peptide-MHC complexes and can redirect to surface proteins on lymphocytes such as T cells, NK cells or Myeloid cells such as macrophages, monocytes or neutrophils and have been gaining traction clinically by targeting effector function mediating receptors including but not limited to the T cell receptor (TCR) complex, including CD3, CD3ε, CD3δ, CD3γ, TCR, TCRα, TCRβ, TCRγ, TCRδ or combinations thereof, CD8, CD4, CD2, Fas Ligand, CD40, CD40L, CD137, CD28, CD56, NKG2D, NKp46, PD1, PDL1, CTLA4, CLEC5A, CD79, BCR, OX40, TIM3, TIGIT, CD7, LAG3, CD11a, CD18, CD80, CD86 dectin-1, dectin-2, dectin-3, FcγRIIIa, FcγRIV, FcγRIIIb, FcγRIIa, FcγRIIc, FcγRIIb, FcγRI, C1q, FcRL5, pIgR, FcαRI, Fcα/μR, FcμR, FcεRI or FcεRII.

[0242] In some embodiments or in combination with previous embodiments, the heterologous polypeptide or multimeric protein and nucleic acids encoding the same, comprises:
[0243] (a) at least one immunoglobulin-binding domain
[0244] (b) and at least one immune cell surface protein-binding domain derived from a natural soluble ligand derivatives or analogs thereof or the extracellular portion of a natural receptor or ligand found on an immune cell including but not limited to Lymphoid cells, Myeloid cells, T cells, B cells, NK cells, Macrophages, Monocytes, NK-T cells, Neutrophils, Dendritic cells, Basophils, Eosinophils and Mast cells

[0245] In some embodiments or in combination with previous embodiments, the heterologous polypeptide or multimeric protein comprises:
[0246] (a) at least one immunoglobulin-binding domain
[0247] (a) at least one immune cell surface protein-binding domain is derived from a natural soluble ligand including but not limited to cytokines, chemokines, pentraxins, galectin-9, HMGB1, TGF-beta, growth factors, pattern recognition proteins, lectins and enzymes, including derivatives or analogs thereof or the extracellular portion of a natural receptor or ligand including but not limited to PD1, PDL1, PDL2, CTLA4, OX40, OX40L, TIM3, TIM1, LAG3, TIGIT, CD137, CD137L, CD28, CD2, CD7, CD11a, CD11b, CD18, CD80, CD86, MHC-I, MHC-II, MHC-G, HLA-DR, CD209, CD206, Galectin-3, LSECtin, FGL1, CD112, CD155, HVEM, CEACAM-1, Fas ligand, TCR complex, TCRα, TCRβ, TCRγ, TCRδ, CD3, CD3ε, CD3γ, CD3δ, CD226, CD27, CD47, SIRP1α, CCR8, TNFR2, CD103, CD39, TIGIT, CD96, VISTA, BTLA, B7-H3, CD8, CD4, dectin-1, dectin-2, dectin-3, chemokine receptors, cytokine receptors, growth factor receptors, pattern recognition receptors, NKG2D, NKp46, MICA, ULBP-1, ULBP-2, BCR, CD79, CD40, CD40L and enzymes including derivatives or analogs thereof.

[0248] In some embodiments or in combination with previous embodiments, a heterologous polypeptide or multimeric protein comprises
[0249] (a) at least one immunoglobulin-binding domain
[0250] (b) At least one immune cell surface protein-binding domain is an antigen-binding domain, antibody or antigen-binding fragment including derivatives or analogs thereof with affinity and specificity for the extracellular portion of a natural receptor or ligand including but not limited to PD1, PDL1, PDL2, CTLA4, OX40, OX40L, TIM3, TIM1, LAG3, TIGIT, CD137, CD137L, CD28, CD2, CD7, CD11a, CD11b, CD18, CD80, CD86, MHC-I, MHC-II, MHC-G, HLA-DR, CD209, CD206, Galectin-3, LSECtin, FGL1, CD112, CD155, HVEM, CEACAM-1, Fas ligand, TCR complex, TCRα, TCRβ, TCRγ, TCRδ, CD3, CD3ε, CD3γ, CD3δ, CD226, CD27, CD47, SIRP1α, CCR8, TNFR2, CD103, CD39, TIGIT, CD96, VISTA, BTLA, B7-H3, CD8, CD4, chemokine receptors, cytokine receptors, growth factor receptors, pattern recognition receptors, NKG2D, NKp46, MICA, ULBP-1, ULBP-2, BCR, CD79, CD40, CD40L, FcγRIIIa, FcγRIV, FcγRIIIb, FcγRIIa, FcγRIIc, FcγRIIb, FcγRI, FcRL5, pIgR, FcαRI, Fcα/μR, FcμR, FcεRI, FcεRII, DC-SIGN, CLEC5A dectin-1, dectin-2, dectin-3,
[0251] In some embodiments or in combination with previous embodiments, a heterologous polypeptide or multimeric protein comprises
[0252] (a) at least one immunoglobulin-binding domain
[0253] (b) at least one immune cell surface protein-binding domain is an antigen-binding domain, antibody or antigen-binding fragment including derivatives or analogs thereof with affinity and specificity for the extracellular portion of a natural receptor or ligand including but not limited to Lymphoid cells, Myeloid cells, T cells, B cells, NK cells, Macrophages, Monocytes, NK-T cells, Neutrophils, Dendritic cells, Basophils, Eosinophils and Mast cells

[0254] In some aspects, it is desirable to have a heterologous polypeptide or multimeric protein with a long half-life in vivo. Multiple half-life extension strategies have been previously described (Strohl, 2015) including but not limited to proteins, polypeptides, protein fusions and like comprising: human serum albumin (HSA), anti-HSA antibody, transferrin, anti-transferrin antibody, Fc, PEGylation, XTENylation, PASylation, HAPylation, ELPylation, GLP fusion, CTP fusion. Monomer Fc fusion proteins have been previously described (Wang et al., 2017) which can enable longer half-life and some Fc receptor binding while maintaining a smaller molecular weight.

[0255] In some aspects, it is desirable to increase the half-life of heterologous polypeptide or multimeric protein comprising an Fc polypeptide where the Fc region has amino acid mutation or mutations that can further enhance the half-life of the molecule in vivo. Multiple Fc-mutational strategies have been previously described (Saunders, 2019) that enable half-life enhancement including but not limited to amino acid mutation or mutations: R435H, N434A, M252Y/S254T/T256E, M428L/N434S, T252L/T253S/T254F, E294(deletion)/T307P/N434Y, T256N/A378V/S383N/N434Y or glycosylation engineering for example E294(deletion) inducing increased Fc-glycan sialylation which in turn increases half-life.

[0256] In some aspects, it is desirable to have an Fc domain that does not substantially bind an immunoglobulin-binding domain such as an Fc receptor or antibody. Multiple strategies have been previously described that enable substantially reduced Fc receptor binding (Saunders, 2019; Strohl, 2015) in an Fc region including but not limited amino acid mutation or mutations: L235E, L234A/L235A, S228P/L235E in IgG4, L234A/L235A/P239G, P331S/L234E/L235F, N265A, G237A, E318A, E233P, G236R/E328R, IgG2/IgG4 cross-subclass, H268Q/V209L/A330S/P331S, V234A/G237A/P238S/H268A/A330S/P331S, A330L, N270A, K322A, P329A, P331A, IgG2/IgG3 cross-subclass, V264A, F241A, N297A, N297G, N297Q, S228P/F234A/L235A or N297 glycosylation engineering, modification or removal including but not limited to high mannose or enzymatic deglycosylation or trimming.

[0257] In some aspects, the IgR is a multimeric protein comprising an immunoglobulin binding domain that is an anti-CH1 antibody fragment and an human IgG CH1 domain with mutation F122Y (Kabat numbering) to ablate the IgR's ability to bind itself, “self-bind” or “self-associate.”

[0258] In some aspects, the IgR is a multimeric protein comprising an immunoglobulin binding domain that is an anti-IgG antibody fragment comprising clone 17F12 CDRs and some or all of a human constant heavy chain domain with one or multiple amino acid mutations including but not limited to CH1-P13S; CH1-K87E; hinge: IgG1-EPKSCDKTH, hinge IgG2-ERKCCV, hinge IgG3-ELKTPLGDTTH, IgG4-ESKYGP to IgG-EFTP; CH2-E64R; CH3-T10I; CH3-S14P; CH3-K30T; CH3-T711; CH3-V92T to ablate the IgR's ability to “self-bind.”

[0259] In some aspects or in combination with previous embodiments, a heterologous polypeptide or multimeric protein comprises:
[0260] (a) at least one immunoglobulin-binding domain
[0261] (b) and at least one immune cell surface protein-binding domain
[0262] (c) and at least one half-life extension domain including but not limited to human serum albumin (HSA), anti-HSA, transferrin, anti-transferrin, PEGylation, XTENylation, PASylation, HAPylation, ELPylation, GLP fusion, CTP fusion or an Fc polypeptide derived from an immunoglobulin wherein the Fc does not substantially bind said Fc-binding region.

[0263] In some embodiments or in combination with previous embodiments a heterologous polypeptide or multimeric protein comprises:
[0264] (a) at least one immunoglobulin-binding domain
[0265] (b) and at least one immune cell surface protein-binding domain
[0266] (c) and at least one half-life extension domain including but not limited to an Fc polypeptide derived from an immunoglobulin wherein the Fc does not substantially bind said immunoglobulin-binding domain by selection of IgG heavy chain Fc polypeptide including the mutations L234A, L235A and P329A or alternatively P329G.

[0267] In some embodiments or in combination with previous embodiments a heterologous polypeptide or multimeric protein comprises:
[0268] (a) at least one immunoglobulin-binding domain
[0269] (b) and at least one immune cell surface protein-binding domain
[0270] (c) and at least one half-life extension domain including but not limited to an Fc polypeptide derived from an immunoglobulin wherein the Fc does not substantially bind said immunoglobulin-binding domain and the Fc polypeptide includes mutations M252Y/S254T/T256E.

[0271] In some aspects or in combination with previous aspects or embodiments, it is desirable to use amino acid mutation or mutations in the constant regions of antibodies to produce multispecific heterologous polypeptides or hetero-multimeric polypeptides with at least one immunoglobulin-binding domain and at least one immune cell surface protein-binding domain. Multiple protein engineering strategies have been previously described (H. Liu et al., 2017) to produce multispecific proteins including but not limited to Quadromas, Knobs-in-holes cognate light chains, Knobs-in-holes cognate light chains, CrossMab Fab, CrossMab VH-VL, CrossMab CH1-CL, TriMab, OAscFab-IgG, dsFv-IgG, DuetMab, cFae-IgG1, Charged-Pair-ScFv-Fc, SEEDbody, Two-Arm LUZ-Y, kappa-lambda-body, bite, diabody, Tamdab, DART, BiKE, TriKE, mFc-VH or Fcab. Previously described protein engineering strategies include introducing amino acid mutation or mutation in the Fc region to produce hetero-multimeric proteins including but not limited mutations in the Fc CH3-1 and CH3-2 respectively comprising: T366Y and Y407T; S354C/T366W and Y349C, T366S, L368A, Y407V; S364H/F405A and Y349T/T394F; T350V/L351Y/F405A/Y407V and T350V/T366L/K392L/T394W; K392D/K409D and E356K/D399K; IgG1 D221E/P228E/L368E and IgG1 D221R/P228R/K409R; IgG2 C223E/P22SE/L368E and IgG2 C223R/E225R/P228R/K409R; K360E/K409W and Q347R/D399V/F405T; K360E/K409W/Y349C and Q347R/D399V/F405T/S354C; 366K (+351K) and 351D or E or D at 349, 368, 349, or 349+355; Duobody F405L and K409R, SEEDbody IgG/A chimera, BEAT residues from TCRα interface and residues from TCRβ interface; K360D/D399M/Y407A and E345R/Q347R/T366V/K409V; or Y349S/K370Y/T366M/K409V and E356G/E357D/S364Q/Y407A. (Brinkmann & Kontermann, 2017; H. Liu et al., 2017).

[0272] In some embodiments or in combination with previous embodiments a multimeric protein comprises:
[0273] (a) at least one immunoglobulin-binding domain
[0274] (b) and at least one immune cell surface protein-binding domain
[0275] (c) and two half-life extension domains including but not limited to an Fc polypeptide derived from an immunoglobulin wherein the Fc does not substantially bind said Fc-binding region
[0276] (d) wherein the first and second Fc polypeptides comprise a hetero-multimerization domain wherein the hetero-multimerization domain may be a knob into hole mutation or mutations, leucine zippers, electrostatic, and the like.

[0277] In some embodiments or in combination with previous embodiments a multimeric protein comprises:
[0278] (a) at least one immunoglobulin-binding domain
[0279] (b) and at least one immune cell surface protein-binding domain
[0280] (c) and two half-life extension domains including but not limited to an Fc polypeptide derived from an immunoglobulin wherein the Fc does not substantially bind said Fc-binding region by selection of IgG heavy chain Fc polypeptide including the mutations L234A, L235A and P329A or alternatively P329G
[0281] (d) wherein the first and second Fc polypeptides comprise a hetero-multimerization domain wherein the hetero-multimerization domain may be a knob into hole mutation, leucine zippers, electrostatic, and the like.

[0282] In some embodiments or in combination with previous embodiments, a multimeric protein comprises
[0283] (a) at least one immunoglobulin-binding domain
[0284] (b) and at least one immune cell surface protein-binding domain
[0285] (c) and two half-life extension domains including but not limited to an Fc polypeptide derived from an immunoglobulin wherein the Fe does not substantially bind said Fc-binding region by selection of IgG heavy chain Fc polypeptide including the mutations L234A, L235A and P329A or alternatively P329G
[0286] (d) wherein the first Fc polypeptide includes mutation T366W and optionally S354C wherein the second Fc polypeptide includes T366S, L368A and Y407V and optionally Y349C.

[0287] In some embodiments or in combination with previous embodiments, a multimeric protein comprises:
[0288] (a) at least one immunoglobulin-binding domain
[0289] (b) and at least one immune cell surface protein-binding domain
[0290] (c) and two half-life extension domains including but not limited to an Fc polypeptide derived from an immunoglobulin wherein the Fc does not substantially bind said Fc-binding region by selection of IgG heavy chain Fc polypeptide including the mutations L234A, L235A and P329A or alternatively P329G and the Fc polypeptide includes mutations M252Y/S254T/T256E
[0291] (d) wherein the first Fc polypeptide includes mutation T366W and optionally S354C wherein the second Fc polypeptide includes T366S, L368A and Y407V and optionally Y349C.

[0292] In some embodiments or in combination with previous embodiments, it is desirable to produce a multimeric protein with a Fab scaffold that has amino acid mutations introduced that remove the native interchain disulfide bond formation between the constant heavy chain and constant light chain and in some instances introduce a buried interchain disulfide between the constant heavy chain and constant light chain as previously described (Brinkmann et al., 1993; Geddie et al., 2022)(Nakamura et al., 2018), within one of the chains (Hagihara & Saerens, 2014; Nakamura et al., 2018) or as a solution to improve light-chain pairing within multi-specific antibodies (Vaks et al., 2018). (Geddie et al., 2022)

[0293] In some embodiments or in combination with previous embodiments, a multimeric protein comprises:
[0294] (a) at least one immunoglobulin-binding domain
[0295] (b) and at least one immune cell surface protein-binding domain
[0296] (c) and at least one immunoglobulin kappa or lambda light chain, derivatives and analogs thereof
[0297] (d) and at least one CH1 domain derivatives and analogs thereof
[0298] (e) Optionally, the constant heavy chain domain 1 contains mutation C233S or the like and constant light chain C214S or the like to prevent interchain disulfide bond formation
[0299] (f) Optionally, the constant heavy chain domain 1 contains mutation C233S and F174C or the like and constant light chain C214S and S176C or the like to prevent interchain disulfide bond formation and to create a buried interchain disulfide bond

[0300] In some aspects or in combination with other embodiments or aspects, it is desirable to have multiple immunoglobulin-binding domains to alter the biological activity or improve the overall affinity and avidity of a heterologous polypeptides or multimeric proteins that comprise at least one immune cell surface protein-binding domain. Strategies to produce immunoglobulin-binding domains comprising multiple FcγR in a head-to-tail arrangement or multi-meric Fc-fusions have been previously described or contemplated (Hogarth & Wines, 2014; Johnson et al., 2010; Rueger et al., 2018).

[0301] In some embodiments or in combination with previous embodiments, a heterologous polypeptide or multimeric protein comprises:
[0302] (a) a first immunoglobulin-binding domain
[0303] (b) and at least one immune cell surface protein-binding domain
[0304] (c) and a second immunoglobulin-binding domain wherein the second immunoglobulin-binding domain is different from the first immunoglobulin domain
[0305] (d) optionally the second immunoglobulin-binding domain is the same from the first immunoglobulin-binding domain wherein the domains are not arranged head to tail if they are derived from FcγR type Fc receptors

[0306] In some aspects or in combination with other embodiments or aspects, it is desirable to have multiple immune cell surface protein-binding domains to alter the biological activity or improve the overall affinity and avidity of a heterologous polypeptides or multimeric proteins that comprise at least one immunoglobulin binding domain. For instance it has been previously described that engaging CD3 and co-stimulation or immune checkpoint targets can provide benefit to T cell engagers, for instance CD3 and CD28 (Promsote et al., 2023), CD3 and CD137 (L. Liu et al., 2019) CD3 and PD1 (Herrmann et al., 2018).

[0307] In some embodiments or in combination with previous embodiments, a heterologous polypeptide or multimeric protein comprises:
[0308] (a) at least one immunoglobulin-binding domain
[0309] (b) and a first immune cell surface protein-binding domain
[0310] (c) and a second immune cell surface protein-binding domain
[0311] (d) Optionally, a second immune cell surface protein-binding domain wherein the second immune cell surface protein binding domain is the same as the first

[0312] In some aspects, cysteines are used in antibody fragments described herein to enable site-specific conjugation to a lipid or polymer. Antibodies modified by engineering cysteines into specific sites for conjugation have been previously described (Pillow et al., 2014)(Junutula et al., 2008)(Beck et al., 2017)(Jeffrey et al., 2013)(Tumey et al., 2017). Optionally, non-natural amino acids can be incorporated into specific sites for conjugation (Hallam et al., 2015).

[0313] In some embodiments or in combination with previous embodiments, a heterologous polypeptide or multimeric protein comprises:
[0314] (a) at least one immunoglobulin-binding domain
[0315] (b) and at least one immune cell surface protein-binding domain
[0316] (c) and a free cysteine at or near the C-terminus or optionally at or near the N-terminus.

[0317] In some embodiments or in combination with previous embodiments, a heterologous polypeptide or multimeric protein comprises:
[0318] (a) at least one immunoglobulin-binding domain
[0319] (b) and at least one immune cell surface protein-binding domain
[0320] (c) and a covalently linked lipid component.

[0321] In some embodiments or in combination with previous embodiments, a heterologous polypeptide or multimeric protein comprises:
[0322] (a) at least one immunoglobulin-binding domain
[0323] (b) and at least one immune cell surface protein-binding domain
[0324] (c) and a covalently linked lipid, PEG-lipid or optionally cholesterol component.

[0325] In some embodiments or in combination of previous embodiments, the present invention contemplates a method using a heterologous polypeptide or multimeric protein to treat disease as a monotherapy or in combination with one or more standard, current or experimental therapeutics to treat cancer, immune disorders and pathogenic infections including but not limited to: Rituximab, Trastuzumab, Cetuximab, Bevacizumab, Ofatumumab, Pertuzumab, Obinutuzumab, Racotumomab, Ramucirumab, Alemtuzumab, Necitumumab, Dinutuximab, Daratumumab, Elotuzumab, Olaratumab, Atezolizumab, Inotuzumab ozogamicin, Avelumab, Durvalumab, Gemtuzumab ozogamicin, Mogamulizumab (mogamulizumab-kpkc), Cemiplimab (cemiplimab-rwlc), Emapalumab (emapalumab-lzsg), Moxetumomab pasudotox (moxetumomab pasudotox-tdfk), Polatuzumab vedotin (polatuzumab vedotin-piiq), Enfortumab vedotin (enfortumab vedotin-ejfv), [fam-]trastuzumab deruxtecan, (fam-trastuzumab deruxtecan-nxki), Isatuximab (isatuximab-irfc), Sacituzumab govitecan (sacituzumab govitecan-hziy), Tafasitamab (tafasitamab-cxix), Belantamab mafodotin (belantamab mafodotin-blmf), Naxitamab-gqgk, Margetuximab-cmkb, Loncastuximab tesirine, Dostarlimab, Amivantamab, Tisotumab vedotin, tisotumab vedotin-tftv, Relatlimab, Tremelimumab, Nivolumab, Pembrolizumab, ipilimumab, Sotrovimab, Casirivimab, imdevimab, Regdanvimab, Relatlimab, Tixagevimab, cilgavimab, Nirsevimab, Mirvetuximab soravtansine.

[0326] In some embodiments or in combination of previous embodiments, the present invention contemplates a kit comprising heterologous polypeptide or multimeric protein.

[0327] As stated herein, the pharmaceutical compositions comprise one or more linker sequences. A linker sequence serves to provide flexibility between polypeptides, such that, for example, the immunoglobulin binding domain and the immune cell surface protein binding domain are capable of engaging their targets simultaneously. The linker sequence can be located between any or all of the immunoglobulin binding domains, immune cell surface binding domains, the serum half-life extension element, and/or the blocking moiety. Suitable linkers can be of different lengths, such as from 1 amino acid (e.g., Gly) to 20 amino acids, from 2 amino acids to 15 amino acids, from 3 amino acids to 12 amino acids, including 4 amino acids to 10 amino acids, amino acids to 9 amino acids, 6 amino acids to 8 amino acids, or 7 amino acids to 8 amino acids, and may be 1, 2, 3, 4, 5, 6, 7, 8, 9, 10, 11, 12, 13, 14, 15, 16, 17, 18, 19, 20, 21, 22, 23, 24, 25, 26, 27, 28, 29, 30, 31, 32, 33, 34, 35, 36, 37, 38, 39, 40, 41, 42, 43, 44, 45, 46, 47, 48, 49, 50, 51, 52, 53, 54, 55, 56, 57, 58, 59, or 60 amino acids. A blocking moiety can prevent one or more immunoglobulin binding domains or one or more immune cell surface protein binding domains or both from substantially engaging their targets. The linker can comprise a cleavage site specific to environmental conditions including but not limited to pH, redox potential, electrical potential and enzyme such as metalloproteases. The linker can be designed to be conditionally broken or change conformation to relieve the blocking moiety from preventing the immunoglobulin binding domains or the immune cell surface protein binding domains from substantially engaging their targets.

[0328] he method can further involve the administration of one or more additional agents to treat cancer, such as chemotherapeutic agents (e.g., Adriamycin, Cerubidine, Bleomycin, Alkeran, Velban, Oncovin, Fluorouracil, Thiotepa, Methotrexate, Bisantrene, Noantrone, Thiguanine, Cytaribine, Procarabizine), immuno-oncology agents (e.g., anti-PD-L1, anti-CTLA4, anti-PD-1, anti-CD47, anti-GD2, anti-SIRP1α), cellular therapies (e.g., CAR-T, T-cell therapy), oncolytic viruses and the like.

[0329] In some embodiments, the heterologous polypeptide comprises: (a) one or more Fc-binders with affinity and specificity for the Fc portion of an immunoglobulin molecule (Ig); and (b) at least one domain, including derivatives and analogs thereof, with affinity and specificity for at least one extracellular polypeptide, present on immune cells where the Fc-binder comprises the extracellular domain of FcγRI, FcγRIIA, FcγRIIB/C, FcγRIIIA, FcγRIIIB, FcαRI, Fcα/μR, FcεRI, FcεRII, pIgR or FcRn including alloytpes, derivatives and analogs thereof. Selection of the ligand binding domain of an Fc receptor for use in the heterologous polypeptide described her, ein will be apparent to one of skill in the art. For example, it may depend on factors such as the isotype of the antibody to which binding of the Fc receptor is desired and the desired affinity of the binding interaction.

[0330] In some embodiments, the heterologous polypeptide comprises: (a) one or more Fc-binders with affinity and specificity for the Fc portion of an immunoglobulin molecule (Ig); and (b) at least one domain, including derivatives and analogs thereof, with affinity and specificity for at least one extracellular polypeptide, present on immune cells where the Fc-binder may be synthetic polypeptides engineered specifically to bind the Fc portion of any of the Ig molecules described herein with high affinity and specificity. For example, such an Fc-binder can be an antibody or an antigen-binding fragment thereof that specifically binds the Fc portion of an immunoglobulin. Examples include, but are not limited to, fragment antigen-binding region (Fab) or (Fab)2, a single-chain variable fragment (scFv), a domain antibody, or a nanobody. Alternatively, an Fc-binder can be a synthetic peptide that specifically binds the Fc portion, such as, but not limited to, a Kunitz domain, a small modular immunopharmaceutical (SMIP), an adnectin, an avimer, an affibody, a DARPin, or an anticalin, Fc-III peptide (Multiple resolution-JaLC, n.d.) which may be identified by screening a peptide combinatory library for binding activities to Fc.

[0331] In some embodiments, the heterologous polypeptide comprises: (a) one or more Fc-binders with affinity and specificity for the Fc portion of an immunoglobulin molecule (Ig); and (b) at least one domain, including derivatives and analogs thereof, with affinity and specificity for at least one extracellular polypeptide, present on immune cells where the Fc-binder may be derived from naturally occurring proteins such as mammalian Fc receptors, certain bacterial proteins such as Protein A or Protein G and virus proteins such as TspB, gE, gI, gpI, FcγR-like HCV core protein, gp34, gp68, gpRL13, gp95, fcr-1.

[0332] In some embodiments, the heterologous polypeptide comprises: (a) one or more Fc-binders with affinity and specificity for the Fc portion of an immunoglobulin molecule (Ig); and (b) at least one domain, including derivatives and analogs thereof, with affinity and specificity for at least one extracellular polypeptide, present on immune cells where an extracellular polypeptide (b) comprises the extracellular domain(s) of FcγRI, FcγRII, FcγRIII, FcαRI, Fcα/μR, FcεRI, FcεRII, pIgR, FcRn, T cell receptor (TCR) complex (including CD3R, CD3δ, CD3γ, TCRα, TCRβ, TCRγ, TCRδ or combinations thereof), CD8, CD2, Fas Ligand, CD40L, CD16, CD32, CD64, NKG2D, NKp46, PD1, PDL1, CTLA4, OX40, TIM3, LAG3, TIGIT, CD137, CD28, CD28, CD7, CD11a, CD18, CD80, CD86, CD121a, CD121b, IL-18Rα, IL-18Rβ, CD25, CD122, CD132, CD124, CD213a13, CD127, CD360, CD19, CD20, CD5, IL-9R, CD213a1, CD213a2, IL-15Ra, CD123, CDw131, CDw125, CD131, CD116, CDw131, CD126, CD130, IL-11Ra, CD130, CD114, CD212, LIFR, CD130, OSMR, CDw210, IL-20Rα, IL-20Rβ, IL-14R, CD4, CDw217, CD118, CDw119, LTβR, CD120a, CD120b, CD137L, BCMA, TACI, CD27, CD30, CD95 (Fas), GITR, GITRL, CLEC5A, LTbR, HVEM, TRAILR1-4, Apo3, RANK, OPG, TGF-βR1, TGF-βR2, TGF-βR3, EpoR, TpoR, Flt-3, CD117, CD115, or CDw136, CD47, SIPR1α, CCR8, TNFR2, CD103, CD39, CD79, dectin-1, dectin-2, dectin-3.

[0333] In some embodiments, the heterologous polypeptide comprises: (a) one or more immunoglobulin-binding domains with affinity and specificity for a region or multiple regions of an immunoglobulin molecule (Ig); and (b) at least one domain, including derivatives and analogs thereof, with affinity and specificity for at least one extracellular polypeptide, present on immune cells; (c) wherein the heterologous polypeptide additionally is fused to a transmembrane domain and optionally one or more intracellular domains.

[0334] In some embodiments, the heterologous polypeptide comprises: (a) one or more immunoglobulin-binding domains with affinity and specificity for a region or multiple regions of an immunoglobulin molecule (Ig); and (b) at least one domain, including derivatives and analogs thereof, with affinity and specificity for at least one extracellular polypeptide, present on immune cells; (c) wherein the heterologous polypeptide is conjugated to a chemical compound or compounds such as a lipid, PEG, cytotoxic drug agent.

[0335] Various embodiments are as follows.

[0336] 1. A heterologous polypeptide comprising:
[0337] at least one immunoglobulin binding domain; and
[0338] at least one immune cell surface protein-binding domain;
[0339] wherein the at least one immunoglobulin binding domain is derived from an Fc receptor or Fc binder, including but not limited to, FcγRIII, mFcγRIV, FcγRIIa, FcγRIIb, FcγRIIc, FcγRI, mFcγRIII, mFcγRIIa, mFcγRIIb, mFcγRI, FcαRI, C1q, FcRL, FcRL5, pIgR, Fcα/μR, FcμR, FcεRI, FcεRII, FcRn, TRIM21, allotypes, derivatives and analogs thereof; wherein the at least one immunoglobulin binding domain is derived from an antigen-binding domain, antibody or antigen-binding fragment, variants, derivatives or analogs thereof comprising VH and VL pairs, ScFv, Fab, IgG, sdAb-VL, sdAb-VH, VHH or avimer, derivatives or analogs thereof,
[0340] wherein the heterologous polypeptide comprises one or more half-life extension domains comprising anti-HSA antigen-binding domain, antibody or antigen-binding fragment, variants, derivatives or analogs thereof comprising VHH or single domain antibodies, immunoglobulin IgG Fc domains their variants, derivatives or analogs thereof,
[0341] wherein the heterologous polypeptide comprises at least two immunoglobulin binding domains; and
[0342] wherein the heterologous polypeptide comprises at least two immune cell surface protein-binding domains.

[0343] 2. A heterologous polypeptide comprising:
[0344] at least one immunoglobulin binding domain; and
[0345] at least one immune cell surface protein-binding domain;
[0346] wherein the at least one immunoglobulin binding domain comprises all or a portion of the Fc receptor of SEQ ID NO: 1, 2, 3, 4, 5, 6, 7, 8, 9, 10, 11, 12, 13, 14, 15, 16, 17, 18, 19, 20, 23, 77, 80, 271, 272, 273, 274, 275, 276, 277, 294, 296, 298, 300, 324 and 325;
[0347] wherein the at least one immunoglobulin binding domain is derived from FcγRIIa comprising one or more mutations comprising R56H, K118N, T120V, L160Q and V172E of SEQ ID NO: 9; or
[0348] wherein the at least one immunoglobulin binding domain is derived from FcγRIII comprising one or more mutations comprising S181P, K122N, T124V, Q176E, 190R, T118K, A119L and Y134F of SEQ ID NO: 1;
[0349] wherein the heterologous polypeptide comprises at least two immunoglobulin binding domains; and
[0350] wherein the heterologous polypeptide comprises at least two immune cell surface protein-binding domains.

[0351] 3. A heterologous polypeptide comprising:
[0352] at least one immunoglobulin binding domain; and
[0353] at least one immune cell surface protein-binding domain;
[0354] wherein the at least one immunoglobulin binding domain is derived from an antigen-binding domain, antibody or antigen-binding fragment their variants, derivatives or analogs thereof, including but not limited to, VH and VL pairs, ScFv, Fab, IgG, sdAb-VL, sdAb-VH, VHH or avimer, their derivatives or analogs thereof;
[0355] wherein the at least one immunoglobulin binding domain comprises at least one of the CDR or FR regions in SEQ ID NO: 569, 570, 571, 572, 573, 574, 575, 576, 577, 578, 579, 580, 581, 582, 583, 584, 585, 586, 587, 588, 589, 590, 591, 592, 593, 594, 595, 596, 597, 598, 599, 601, 602, 603, 604, 605, 606, 607, 608, 609, 610, 611, 612, 613, 614, 615, 616, 617, 618, 619, 620, 621, 622, 623, 624, 625, 626, 627, 628, 629, 6230, 631, 632, 633, 634, 635, 636, 637, 638, 639, 640, 641, 642, 643, 644, 645, 646, 647, 648, 649, 650, 651, 652, 653, 654, 655, 656, 657, or the avimer defined in SEQ ID NO: 132;
[0356] wherein the heterologous polypeptide comprises at least two immunoglobulin binding domains; and
[0357] wherein the heterologous polypeptide comprises at least two immune cell surface protein-binding domains.

[0358] 4. A heterologous polypeptide comprising:
[0359] at least one immunoglobulin binding domain;
[0360] at least one immune cell surface protein-binding domain;
[0361] wherein at least one immune cell surface protein-binding domain is derived from an antigen-binding domain, antibody or antigen-binding fragment their variants, derivatives or analogs thereof, including but not limited to, VH and VL pairs, ScFv, Fab, IgG, sdAb-VL, sdAb-VH, VHH, their derivatives or analogs thereof;
[0362] wherein the immune cell surface protein-binding domain comprises one or more CDR or FR regions in SEQ ID NO: 580, 606, 608, 609, 610, 611, 612, 615, 626, 635, 636, 637, 638, 639, 658, 659, 660, 661, 662, 663, 664, 665, 666, 667, 668, 669, 670, 671, 672, 673, 674, 675, 676, 677, 678, 679, 680, 681, 682, 683, 684, 685, 686, 687, 688, 689, 690, 691, 692, 693, 694, 695, 696, 697, 698, 699, 700, 701, 702, 703, 704, 705, 706, 707, 708, 709, 710, 711, 712, 713, 714, 715, 716, 717, 718, 719, 720, 721, 722, 723, 724, 725, 726, 727, 728, 729, 730, 731, 732, 733, 734, 735, 736, 737, 738, 739, 740, 741, 742, 743, 744, 745, 746, 747, 748, 749, 750, 751, 752, 753, 754, 755, 756, 757, 758, 759, 760, 761, 762, 763, 764, 765, 766, 767, 768, 769, 770, 771, 772, 773, 774, 775, 776, 777, 778, 779, 780, 781, 782, 783, 784, 785, 786, 787, 788, 789, 790, 791, 792, 793, 794, 795, 796, 797, 798, 799, 800, 801, 802, 803, 804, 805, 806, 807, 808, 809, 810, 811, 812, 813, 814, 815, 816, 817, 818, 819, 820, 821, 822, 823, 824, 825, 826, 827, 828, 829, 840, 841, 842, 843, 844, 845, 846, 847, 848, 849, 840, 841, 842, 843, 844, 845, 846, 847, 848, 849, 850, 851, 852, 853, 854, 855, 856, 857, 858, 859, 860, 861, 862, 863, 864, 865, 866, 867, 868, 869, 870, 871, 872, 873, 874, 875, 876, 877, 878, 879, 880, 881, 882, 883, 884, 885, 886, 887, 888, 889, 890, 891, 892, 893, 894, 895, 896, 897, 898, 899, 900, 901, 902, 903, 904, 905, 906, 907, 908, 909, 910, 911, 912, 913, 914, 915, 916, 917, 918, 919, 920, 921, 922, 923, 924, 925, 926, 927, 928, 929, 940, 941, 942, 943, 944, 945, 946, 947, 948, 949, 940, 941, 942, 943, 944, 945, 946, 947, 948, 949, 950, 951, 952, 953, 954, 955, 956, 957, 958, 959, 960, 961, 962, 963, 964, 965, 966, 967, 968, 969, 970, 971, 972, 973, 974, 975, 976, 977, 978, 979, 980, 981, 982, 983, 984, 985, 986, 987, 988, 989, 990, 991, 992, 993, 994, 995, 996, 997, 998, 999, 1000, 1001, 1002, 1003, 1004, 1005, 1006, 1007, 1008, 1009, 1010, 1011, 1012, 1013, 1014, 1015, 1016, 1017, 1018, 1019, 1020, 1021, 1022, 1023, 1024, 1025, 1026, 1027, 1028, 1029, 1030, 1031, 1032, 1033, 1034, 1035, 1036, 1037, 1038, 1039, 1040, 1041, 1042, 1043, 1044, 1045, 1046 and 1047;
[0363] wherein the heterologous polypeptide comprises at least two immunoglobulin binding domains; and
[0364] wherein the heterologous polypeptide comprises at least two immune cell surface protein-binding domains.

[0365] 5. A heterologous polypeptide comprising:
[0366] at least one immunoglobulin binding domain;
[0367] at least one immune cell surface protein-binding domain;
[0368] at least one half-life extension domain;
[0369] wherein the at least one half-life extension domain comprises anti-HSA antigen-binding domain, antibody or antigen-binding fragment their variants, derivatives or analogs thereof comprising VHH or single domain antibodies, comprising one or more CDR or FR regions in SEQ ID NO: 558, 559, 560, 561, 562, 563, 564, 565, 566, 567 and 568;
[0370] wherein the heterologous polypeptide comprises at least two immunoglobulin binding domains; and
[0371] wherein the heterologous polypeptide comprises at least two immune cell surface protein-binding domains.

[0372] 6. A heterologous polypeptide comprising:
[0373] at least one immunoglobulin binding domain;
[0374] at least one immune cell surface protein-binding domain;
[0375] at least one half-life extension domain;
[0376] wherein the heterologous polypeptide is a single chain of the structure:
[0377] D1-D2-D3
[0378] and
[0379] wherein the at least one half-life extension domain comprises anti-HSA antigen-binding domain, antibody or antigen-binding fragment their variants, derivatives or analogs thereof comprising VHH or single domain antibodies, comprising one or more CDR or FR regions in SEQ ID NO: 558, 559, 560, 561, 562, 563, 564, 565, 566, 567 and 568.

[0380] 7. The heterologous polypeptide of claim 5, further comprising one or more linkers between the domains.

[0381] 8. A heterologous polypeptide comprising:
[0382] at least two immunoglobulin binding domain;
[0383] at least one immune cell surface protein-binding domain;
[0384] at least one half-life extension domain;
[0385] wherein the heterologous polypeptide is a single chain with at least four domains of the structure:
[0386] D1-D2-D3-D4
[0387] and
[0388] wherein the at least one half-life extension domain comprises anti-HSA antigen-binding domain, antibody or antigen-binding fragment their variants, derivatives or analogs thereof comprising VHH or single domain antibodies, comprising one or more CDR or FR regions in SEQ ID NO: 558, 559, 560, 561, 562, 563, 564, 565, 566, 567 and 568.

[0389] 9. The heterologous polypeptide of claim 6, further comprising one or more linkers between the domains.

[0390] 10. A multimeric protein wherein regions of the molecule comprise:
[0391] at least one immunoglobulin binding domain;
[0392] at least one immune cell surface protein-binding domain; and
[0393] two half-life extension domains comprising a first Fc polypeptide and a second Fc polypeptide derived from an immunoglobulin wherein the Fc does not substantially bind the immunoglobulin binding domain;
[0394] wherein the first Fc polypeptide and the second Fc polypeptide comprise a hetero-multimerization domain wherein the hetero-multimerization domain is at least one knob into hole mutation;
[0395] wherein the multimeric protein comprises at least two immunoglobulin binding domains; and
[0396] wherein the multimeric protein comprises at least two immune cell surface protein-binding domains.

[0397] 11. A multimeric protein wherein regions of the molecule comprise:
[0398] at least one immunoglobulin binding domain;
[0399] at least one immune cell surface protein-binding domain;
[0400] two half-life extension domains comprising a first Fc polypeptide and a second Fc polypeptide derived from an immunoglobulin wherein the Fc does not substantially bind the immunoglobulin binding domain by selection of a IgG heavy chain Fc polypeptide comprising mutations L234A, L235A and P329A or P329G in the constant heavy chain domain 2 (EU Numbering);
[0401] wherein the first Fc polypeptide and the second Fc polypeptide comprise a hetero-multimerization domain wherein the hetero-multimerization domain is at least one knob into hole mutation;
[0402] wherein the multimeric protein comprises at least two immunoglobulin binding domains; and
[0403] wherein the multimeric protein comprises at least two immune cell surface protein-binding domains.

[0404] 12. A multimeric protein wherein regions of the molecule comprise:
[0405] at least one immunoglobulin binding domain;
[0406] at least one immune cell surface protein-binding domain;
[0407] two half-life extension domains including but not limited to a first Fc polypeptide and a second Fc polypeptide derived from an immunoglobulin wherein the Fc does not substantially bind said immunoglobulin binding domain by selection of a IgG heavy chain Fc polypeptide comprising mutations L234A, L235A and P329A or P329G in the constant heavy chain domain 2 (EU Numbering);
[0408] wherein the first Fc polypeptide comprises mutation T366W; and
[0409] wherein the second Fc polypeptide comprises T366S, L368A and Y407V in the constant heavy chain domain 3 (EU Numbering);
[0410] wherein the first Fc polypeptide further comprises S354C and wherein the second Fc polypeptide further comprises Y349C in the constant heavy chain domain 3 (EU Numbering);
[0411] wherein the multimeric protein comprises at least two immunoglobulin binding domains; and
[0412] wherein the multimeric protein comprises at least two immune cell surface protein-binding domains.

[0413] 13. A multimeric protein wherein regions of the molecule comprise:
[0414] at least one immunoglobulin binding domain;
[0415] at least one immune cell surface protein-binding domain;
[0416] at least one immunoglobulin kappa or lambda constant light chain, their variants, derivatives and analogs thereof;
[0417] at least one immunoglobulin constant heavy chain domain 1 and at least a portion of the immunoglobulin hinge region, their variants, derivatives and analogs thereof,
[0418] wherein the one or more constant heavy chain domain 1 and at least a portion of the hinge comprises mutation C233S and constant light chain C214S (Kabat Numbering);
[0419] wherein the one or more constant heavy chain domain 1 and at least a portion of the hinge comprises mutation C233S and F174C and constant light chain C214S and S176C (Kabat Numbering);
[0420] wherein at least a first pair of constant heavy chain and at least a portion of the hinge that comprises no mutation at C233 and no mutation in constant light chain at C214 and at least a second pair of constant heavy chain domain 1 at least a portion of the hinge comprises mutation C233S or the like and constant light chain C214S or the like (Kabat Numbering); wherein at least a first pair of constant heavy chain and at least a portion of the hinge that contain no mutation at C233 and no mutation in constant light chain at C214 and at least a second pair of constant heavy chain domain 1 and at least a portion of the hinge comprises mutation C233S and F174C and the constant light chain comprises mutation C214S and S176C (Kabat Numbering);
[0421] wherein at least a first pair of constant heavy chain domain 1 and at least a portion of the hinge comprises mutation C233S and constant light chain C214S and at least a second pair of constant heavy chain domain 1 and at least a portion of the contains mutation C233S and F174C and constant light chain C214S and S176C (Kabat Numbering);
[0422] wherein the heterologous polypeptide comprises one or more half-life extension domains comprising anti-HSA antigen-binding domain, antibody or antigen-binding fragment, variants, derivatives or analogs thereof comprising VHH or single domain antibodies, immunoglobulin IgG Fc domains their variants, derivatives or analogs thereof,
[0423] wherein the multimeric protein comprises at least two immunoglobulin binding domains; and
[0424] wherein the multimeric protein comprises at least two immune cell surface protein-binding domains.

[0425] 14. A multimeric protein wherein a region or regions of the molecule comprise:
[0426] at least two immunoglobulin binding domain;
[0427] at least one immune cell surface protein-binding domain;
[0428] at least a second immunoglobulin-binding domain wherein the second immunoglobulin binding domain is separated from the first immunoglobulin binding domain by a linker from 1 amino acid to 20 amino acids comprising regions of the human constant heavy chain domain 1, kappa chain domain, lambda chain domain, polypeptides comprising linkers 13 amino acids or less, linkers comprising 6 amino acids or less, the constant heavy chain domain 1 derived spacer ASTKGPSVFPLAP, ASTKGP or ASTKGPSVFPLAS, the constant kappa chain derived spacer RTVAAPSVFIFPP or RTVAAP, the constant lambda chain derived spacer SQPKAAPSVTLFP, GQPKANPTVTLFP, GQPKAAPSVTLFP, SQPKAA, GQPKAN or GQPKAA, (GGGS)1, (GGGS)2, (GGGS)3, (GGGS)4;
[0429] wherein at least one immunoglobulin binding domain comprises one or more CDR or FR regions in SEQ ID NO: 569, 570, 571, 572, 573, 574, 575, 576, 577, 578, 579, 580, 581, 582, 583, 584, 585, 586, 587, 588, 589, 590, 591, 592, 593, 594, 595, 596, 597, 598, 599, 601, 602, 603, 604, 605, 606, 607, 608, 609, 610, 611, 612, 613, 614, 615, 616, 617, 618, 619, 620, 621, 622, 623, 624, 625, 626, 627, 628, 629, 6230, 631, 632, 633, 634, 635, 636, 637, 638, 639, 640, 641, 642, 643, 644, 645, 646, 647, 648, 649, 650, 651, 652, 653, 654, 655, 656, 657, or the avimer defined in SEQ ID NO: 132; and
[0430] wherein at least a second immunoglobulin-binding domain wherein the second immunoglobulin-binding domain is the same as the first immunoglobulin-binding domain; or
[0431] wherein at least a second immunoglobulin-binding domain wherein the second immunoglobulin-binding domain is different from the first immunoglobulin-binding domain.

[0432] 15. A multimeric protein wherein at least one region comprises:
[0433] at least one immunoglobulin binding domain;
[0434] at least one immune cell surface protein binding domain;
[0435] one or more amino acid mutations in one or more constant or framework domains of human IgG1, IgG2, IgG3 or IgG4, variants, derivatives and analogs thereof wherein the immunoglobulin binding domain does not substantially bind itself or another region or regions of the molecule;
[0436] wherein a mutation of one or more amino acids in the constant heavy chain domain 1 comprising F122Y, P126S and K213E (Kabat Numbering);
[0437] wherein a mutation of one or more amino acids in a in the constant heavy chain domain 2 comprising N276K, L309V, L234A, L235A and P329A or P329G (EU Numbering);
[0438] wherein a heterologous polypeptide or multimeric protein and nucleic acids encoding the same, comprises at least two immunoglobulin binding domains; and wherein a heterologous polypeptide or multimeric protein and nucleic acids encoding the same, comprises at least two immune cell surface protein binding domains.

[0439] 16. A multimeric protein wherein regions of the molecule comprise:
[0440] at least one immunoglobulin kappa or lambda constant light chain, their variants, derivatives and analogs thereof, and
[0441] at least one immunoglobulin constant heavy chain domain 1 and at least a portion of the immunoglobulin hinge region, their variants, derivatives and analogs thereof; and two half-life extension domains comprising a first Fc polypeptide and a second Fc polypeptide derived from an immunoglobulin wherein the first and second Fc polypeptides comprise a hetero-multimerization domain wherein the hetero-multimerization domain is selected from at least one knob into hole mutation;
[0442] wherein the first Fc polypeptide comprises T366W and wherein the second Fc polypeptide comprises T366S, L368A and Y407V in the constant heavy chain domain 3 (EU Numbering);
[0443] wherein the Fc does not substantially bind one or more of its cognate Fc receptors by selection of IgG heavy chain Fc polypeptide comprising L234A, L235A and P329A in the constant heavy chain domain 2 (EU Numbering);
[0444] wherein one or more constant heavy chain domain 1 and all, none or a portion of the hinge comprises mutation C233S and constant light chain C214S (Kabat Numbering);
[0445] wherein one or more constant heavy chain domain 1 and at least a portion of the hinge comprises mutation C233S and F174C and constant light chain C214S and S176C (Kabat Numbering);
[0446] wherein at least a first pair of constant heavy chain and at least a portion of the hinge that comprises no mutation at C233 and no mutation in constant light chain at C214 and at least a second pair of constant heavy chain domain 1 and at least a portion of the hinge comprises a mutation at C233S and a constant light chain C214S (Kabat Numbering);
[0447] wherein at least a first pair of constant heavy chain and at least a portion of the hinge that contain no mutation at C233 and no mutation in constant light chain at C214 and at least a second pair of constant heavy chain domain 1 and at least a portion of the hinge comprises mutations at C233S and F174C and the constant light chain comprises mutation C214S and S176C (Kabat Numbering);
[0448] wherein at least a first pair of constant heavy chain domain 1 and at least a portion of the hinge comprises a mutation at C233S and constant light chain C214S and at least a second pair of constant heavy chain domain 1 and at least a portion of the hinge contains mutation C233S and F174C and constant light chain C214S and S176C (Kabat Numbering).

[0449] 17. The multimeric protein of claim 16
[0450] wherein the first Fc polypeptide further comprises S354C and wherein the second Fc polypeptide further comprises Y349C in the constant heavy chain domain 3 (EU Numbering); and
[0451] wherein IgG heavy chain Fc polypeptide further comprises P329G in the constant heavy chain domain 2 (EU Numbering).

[0452] 18. A heterologous polypeptide or multimeric protein of claim 1, 2, 3, 4, 13, 14, or 16 wherein an additional region of the molecule comprises a free cysteine at or near the C-terminus.

[0453] 19. A heterologous polypeptide or multimeric protein of claim 1, 2, 3, 4, 13, 14, or 16 wherein an additional region of the molecule comprises a covalently linked PEG-lipid.

[0454] 20. A method of treatment comprising administering the heterologous polypeptide or multimeric protein of claim 1, 2, 3, 4, 5, 6, 7, 8, 9, 10, 11, 12, 13, 14, 16 or 17 to a patient in need thereof to treat disease as a monotherapy.

[0455] 21. A method of treatment comprising administering the heterologous polypeptide or multimeric protein of claim 1, 2, 3, 4, 5, 6, 7, 8, 9, 10, 11, 12, 13, 14, 16 or 17 to a subject in need thereof to treat cancer, immune disorders, or pathogenic infections in combination with at least one selected from standard, current, or experimental therapeutics.

[0456] 22. A nucleotide encoding the heterologous polypeptide or multimeric protein of claim 1, 2, 3, 4, 5, 6, 7, 8, 9, 10, 11, 12, 13, 14, 16 or 17.

[0457] 23. A kit comprising the heterologous polypeptide or multimeric protein of claim 1, 2, 3, 4, 5, 6, 7, 8, 9, 10, 11, 12, 13, 14, 16 or 17.

### EXAMPLES

### Example 1. Expression and Purification of FcγR3A/αCD3 and FcγR3A/αTCR Fusions

[0458] Fc-binding heterologous polypeptides were encoded into plasmid DNA expression vectors and transiently expressed as recombinant proteins in chinese hamster ovarian (CHO) cells. The proteins were purified using immobilized metal chromatography by incorporating a GGHHHHHH (SEQ ID NO: 21) tag on the C-terminus or by Protein A if the protein comprised an Fc region.

[0459] The extracellular domain of the CD16A Fc-receptor (FcγR3A-V158, SEQ ID NO: 1) with an S197P mutation (FcγR3AV-S197P, SEQ ID NO: 23), to ablate susceptibility to ADAM17 cleavage, was fused via a (G4S)₃ linker (SEQ ID NO: 22) to: a humanized version of an αCD3 ScFv clone HzUCHT1 in the VL-VH orientation using a (G4S)₃ linker (VH SEQ ID NO: 24; VL SEQ ID NO: 25, ScFv-HzUCHT1 SEQ ID NO: 26); to form a FcγR3A/ScFv-HzUCHT1 (SEQ ID NO: 27; JIB1, SEQ ID NO: 28) fusion as depicted in FIG. 2A; an αCD3 ScFv clone TR66 in the VH-VL orientation using a (G4S)₃ linker (TR66-VH SEQ ID NO: 29; TR66-VL SEQ ID NO: 30, ScFv-TR66 SEQ ID NO: 31) to form a FcγR3A/ScFv-TR66 fusion (SEQ ID NO: 32; JIB2, SEQ ID NO: 33) as depicted in FIG. 2A; and an αTCR VHH clone V700 (VHH-V700 SEQ ID NO: 34) to form a FcγR3A/VHH-V700 fusion (SEQ ID NO: 35; JIB3, SEQ ID NO: 36) as depicted in FIG. 2A. FIG. 8A, FIG. 8B, FIG. 8C, FIG. 8D, FIG. 8E, FIG. 8F, FIG. 8G, FIG. 8H, FIG. 8I, FIG. 8J, FIG. 8K, and FIG. 8L and Table 1 shows that the proteins were well expressed (by amount recovered using A280 after single step purification) with high purity by both SDS-PAGE and SEC (after single step purification).

TABLE 1
Protein Expression and % Monomer by
SEC for IgRs produced in Example 1.

| Protein | CHO (mg/L) | % Monomer by SEC |
|---|---|---|
| JIB1 | 231 | 85.4% |
| JIB2 | 256 | 68.6% |
| JIB3 | 370 | 84.1% |

### Example 2. Expression and Purification of αHSA/FcγR3A/αCD3 Fusion

[0460] Fc-binding heterologous polypeptides were expressed and purified as described in Example 1.

[0461] A humanized VHH against HSA (SEQ ID NO: 37) was fused via a (G4S)₃ linker to the extracellular domain of the human CD16A Fc-receptor with an S197P mutation which was fused via a (G4S)₃ linker to a humanized version of an αCD3 ScFv clone HzUCHT1 in the VL-VH orientation using a (G4S)₃ linker to form an αHSA-VHH/FcγR3A/αCD3-ScFv fusion (SEQ ID NO: 38; JIB5, SEQ ID NO: 39) as depicted in FIG. 3A. A 6his-tag with a GG spacer was fused to the C-terminus of the ScFv for purification purposes. FIG. 8A, FIG. 8B, FIG. 8C, FIG. 8D, FIG. 8E, FIG. 8F, FIG. 8G, FIG. 8H, FIG. 8I, FIG. 8J, FIG. 8K, and FIG. 8L and Table 2 show that the proteins were well expressed with high purity by both SDS-PAGE and SEC. Comparing FIG. 8A-FIG. 8B with FIG. 8I-FIG. 8J indicates the addition of the anti-HSA VHH at the N-terminus of FcγRIIIA did not promote a substantial amount of aggregation indicating FcγRIIIA is tolerant of binding regions on both its N and C-terminus.

[0462] Table 2. Protein Expression and % Monomer by SEC for IgR produced in Example 2.

TABLE 2
Protein Expression and % Monomer by
SEC for IgR produced in Example 2.

| Protein | CHO (mg/L) | % Monomer by SEC |
|---|---|---|
| JIB5 | 433 | 78.8% |

### Example 3. Expression and Purification of FcγR3A-Fc/αCD3-Fc Heterodimeric Protein

[0463] Fc-binding heterodimer protein was expressed and purified as described in Example 1. The FcγR3A-Fc/αCD3-Fc fusion was expressed as 3 polypeptide chains to assemble into one soluble protein comprising two heterodimer forming heavy chains that assembled using knob-in-hole mutations and a light chain that assembles with one of the two heterodimeric heavy chains as depicted in FIG. 4A. One heavy chain comprised of the extracellular domain of the human CD16A Fc-receptor with an S197P mutation was fused via a (G4S)₃ linker to a partial human IgG1 heavy chain with mutations: C233S to prevent disulfide formation; T366S, L368A, Y407V to produce the “hole” Fc heavy chain; and L234A, L235A and P329A (C233S/Fc-LALAPA-hole, SEQ ID NO: 40) to ablate Fc receptor binding; forming an FcγR3A-Fc polypeptide (FcγR3A-S197P/Fc-LALAPA-hole SEQ ID NO: 41). The other heavy chain comprised of a variable heavy chain for the αCD3 clone SP34 (VH-SP34, SEQ ID NO: 42) and a human IgG1 constant heavy chain with mutations: T366W to produce the “knob” Fc heavy chain; and L234A, L235A and P329A (hIgG1-HC/LALAPA-knob, SEQ ID NO: 43) to ablate Fc receptor binding; forming an SP34 human IgG1 heavy chain (SP34-Fc-LALAPA-knob, SEQ ID NO: 44). The light chain comprised of a variable light chain for the αCD3 clone SP34 (SP34-VL, SEQ ID NO: 45) and a human constant lambda light chain (hLC7, SEQ ID NO: 46) forming an SP34 human light chain (SP34-hLC7, SEQ ID NO: 47). FIG. 8A, FIG. 8B, FIG. 8C, FIG. 8D, FIG. 8E, FIG. 8F, FIG. 8G, FIG. 8H, FIG. 8I, FIG. 8J, FIG. 8K, and FIG. 8L and Table 3 show that the proteins were well expressed with high purity by both SDS-PAGE and SEC. FIG. 8K-FIG. 8L indicates the knob-in-hole mutations promoted a near 1:1 ratio of the FcγR3A-Fc and SP34-Fc arms and the FcR KO mutations prevented self-binding between FcγRIIIA and the hetero-dimer Fcs given the high purity.

TABLE 3
Protein Expression and % Monomer by
SEC for IgR produced in Example 3.

| Protein | CHO (mg/L) | % Monomer by SEC |
|---|---|---|
| JIB6 | 107 | 90.8% |

### Example 4. Expression and Purification of αFc/αCD3 Fusion

[0464] Fc-binding heterologous polypeptides were expressed and purified as described in Example 1.

[0465] An αFc VHH (Fc-10-VHH, SEQ ID NO: 48) capable of binding human Fc was fused via a (G4S)₃ linker to: a humanized version of an αCD3 ScFv clone HzUCHT1 in the VL-VH orientation using a (G4S)₃ linker for form an αFc-VHH/ScFv-HzUCHT1 fusion (SEQ ID NO: 49, SEQ ID NO: 50) as depicted in FIG. 2A. FIG. 8A, FIG. 8B, FIG. 8C, FIG. 8D, FIG. 8E, FIG. 8F, FIG. 8G, FIG. 8H, FIG. 8I, FIG. 8J, FIG. 8K, and FIG. 8L and Table 4 show that the protein was well expressed with high purity by both SDS-PAGE and SEC.

TABLE 4
Protein Expression and % Monomer by
SEC for IgR produced in Example 4.

| Protein | CHO (mg/L) | % Monomer by SEC |
|---|---|---|
| JIB4 | 315 | 97.7% |

### Example 5. Expression and Purification of FcγRIV/αCD3 Fusion

[0466] Fc-binding heterologous polypeptides were expressed and purified as described in Example 1.

[0467] The extracellular domain of the mouse FcγRIV Fc-receptor (mFcγRIV ECD, SEQ ID 8) was fused via a (G4S)₃ linker to: an αCD3 ScFv clone 2C11 in the VH-VL orientation using a (G4S)₄ linker (2C11-VH SEQ ID NO: 51; 2C11-VL SEQ ID NO: 52, ScFv-2C11 SEQ ID 53) for form a FcγRIV/ScFv-2C11 fusion (SEQ ID NO: 54, SEQ ID 55) as depicted in FIG. 2A; an αCD3 ScFv clone KT3 in the VH-VL orientation using a (G4S)₄ linker (KT3-VH SEQ ID NO: 56; KT3-VL SEQ ID NO: 57, ScFv-KT3 SEQ ID 58) to form a FcγRIV/ScFv-KT3 fusion (SEQ ID NO: 59, SEQ 60) as depicted in FIG. 2A; an αCD3 ScFv clone 500A2 in the VH-VL orientation using a (G4S)₄ linker (500A2-VH SEQ ID NO: 61; 500A2-VL SEQ ID NO: 62, ScFv-500A2 SEQ ID NO: 63) for form a FcγRIV/ScFv-500A2 fusion (SEQ ID NO: 64, SEQ ID 65) as depicted in FIG. 2A. FIG. 9A, FIG. 9B, FIG. 9C, FIG. 9D, FIG. 9E, FIG. 9F, FIG. 9G, FIG. 9H, FIG. 9I, and FIG. 9J and Table 5 show that the proteins were well expressed with high purity by both SDS-PAGE and SEC.

TABLE 5
Protein Expression and % Monomer by
SEC for IgR produced in Example 5.

| Protein | CHO (mg/L) | % Monomer by SEC |
|---|---|---|
| FcγRIV/ScFv-2C11-his | 24 | 81.4 |
| FcγRIV/ScFv-KT3-his | 56 | 92.6 |
| FcγRIV/ScFv-500A2-his | 75 | 75.4 |

### Example 6. Expression and Purification of αMSA/FcγRIV/αCD3 Fusion

[0468] Fc-binding heterologous polypeptides were expressed and purified as described in Example 1.

[0469] A VHH against mouse serum albumin (MSA) (SEQ ID NO: 66) was fused via a (G4S)₃ linker to the extracellular domain of the mouse FcγRIV Fc-receptor (FcγRIV, SEQ ID NO: 24) which was fused via a (G4S)₃ linker to an αCD3 ScFv clone 500A2 in the VH-VL orientation using a (G4S)₄ linker to form an αMSA-VH H/FcγRIV/αCD3-ScFv fusion (SEQ ID NO: 67, SEQ ID NO: 68) as depicted in FIG. 3A. A 6his-tag with a GG spacer was fused to the C-terminus of the ScFv for purification purposes. FIG. 9A, FIG. 9B, FIG. 9C, FIG. 9D, FIG. 9E, FIG. 9F, FIG. 9G, FIG. 9H, FIG. 9I, and FIG. 9J shows that the protein was well expressed with reasonable purity by both SDS-PAGE and SEC from single step purification.

TABLE 6
Protein Expression and % Monomer by
SEC for IgR produced in Example 6.

| Protein | CHO (mg/L) | % Monomer by SEC |
|---|---|---|
| αMSA-VHH/FcγRIV/αCD3- | 48 | 54.0 |
| ScFv-his | | |

### Example 7. Expression and Purification of FcγRIV-Fc/αCD3-Fc Heterodimeric Protein

[0470] Fc-binding heterodimeric protein was expressed and purified as described in Example 1.

[0471] The FcγRIV-Fc/αCD3-Fc fusion was expressed as 3 polypeptide chains to assemble into one soluble protein comprising two heterodimer forming heavy chains that assembled using knob-in-hole mutations and a light chain that assembles with one of the two heterodimeric heavy chains as depicted in FIG. 4A. One heavy chain comprised of the extracellular domain of the mouse FcγRIV Fc-receptor fused via a (G4S)₃ linker to a partial mouse IgG2a heavy chain with mutations: E356K, T364S, M368L, T370K, D399K and R411T to produce the Knob-in-holes A (KiH-A) Fc heavy chain; and L234A, L235A and P329G (KiH-A/LALAPG/mIgG2a-Fc, SEQ ID NO: 69) to ablate Fc receptor binding; forming an FcγRIV-Fc polypeptide (FcγRIV/mIgG2a-Fc SEQ ID NO: 70). The other heavy chain comprised of a variable heavy chain for the αCD3 clone 500A2 and a human IgG2a constant heavy chain with mutations: T364S, M368L, T370K, K409D, R411T and K439D to produce the Knob-in-holes B (KiH-B) Fc heavy chain; and L234A, L235A and P329G (mIgG2a-HC/KiH-B/LALAPG, SEQ ID NO: 71) to ablate Fc receptor binding; forming an 500A2 human IgG2a heavy chain (500A2-HC-Fc, SEQ ID 72). The light chain comprised of a variable light chain for the αCD3 clone 500A2 (500A2-VL, SEQ ID NO: 32) and a mouse constant kappa light chain (mLC, SEQ ID NO: 73) forming an 500A2 mouse light chain (500A2-mLC, SEQ ID NO: 74). FIG. 9A, FIG. 9B, FIG. 9C, FIG. 9D, FIG. 9E, FIG. 9F, FIG. 9G, FIG. 9H, FIG. 9I, and FIG. 9J and Table 6 show that the protein was well expressed with high purity by both SDS-PAGE and SEC, the knob-in-hole mutations induced approximately 1:1 ratio between FcγRIV-Fc and 500A2-Fc and the FcR-KO Fc mutations prevented any self-binding between FcγRIV and the heterodimer fusion protein Fcs.

TABLE 7
Protein Expression and % Monomer by
SEC for IgR produced in Example 7.

| Protein | CHO (mg/L) | % Monomer by SEC |
|---|---|---|
| SEQ ID 70, 72, 74, | 235 | 96.8 |

### Example 8. Redirecting T Cells to Blood Cancer Cells by Combining Anti-CD20 IgG with IgRs Targeting CD3 or TCR

[0472] To evaluate the ability of the Fc-binding T cell engaging (FcB-TCE) IgRs to bridge blood cancer cells to T cells a CD20+ Raji cell and CD3/TCR+ Jurkat-CD28-NFAT-Luc co-culture reporter system was employed as displayed in FIG. 10. Commercially available anti-CD20 Rituximab IgG1 (Biointron) was used to opsonize CD20+ Raji cells and bridge to T cells via various IgR proteins including FcγR3A/ScFv-HzUCHT1 fusion (SEQ ID NO: 28); FcγR3A/ScFv-TR66 fusion (SEQ ID NO: 33); FcγR3A/VHH-V700 fusion (SEQ ID NO: 36); αHSA-VHH/FcγR3A/αCD3-ScFv fusion (SEQ ID NO: 39); FcγR3A-Fc/SP34-Fc heterodimer (SEQ ID NO: 41, SEQ ID NO: 44, SEQ ID NO: 47); and an aFc-VHH/ScFv-HzUCHT1 fusion (SEQ ID NO: 50).

[0473] The bioassay was performed by (1) collecting Raji and Jurkat-CD28-NFAT1-luc from cell culture flasks and centrifuging at 300× gravity for 5 min; (2) adjusting the density of Raji to 5E5 cells/mL, also adjust Jurkat-CD28-NFAT-luc to 2.5E6 cells/mL; (3) Adding 40 uL Raji and Jurkat-CD28-NFAT-luc respectively into a 96 well U bottom culture plate (NEST) (4) 20 uL Rituximab, Mosunetuzumab or culture medium, RPMI 1640 (Corning)+1% Fetal Bovine Serum (BI), was added into wells, the working concentrations of Rituximab or Mosunetuzumab were 10× the final target concentration or if combining with an IgR 10 ul of Rituximab and 10 ul of IgR was use at 10× the final target concentration; (5) cells and proteins were mixed gently and incubated in the plate at 37° C. for 6 h; (6) after incubation, 100 μl of Bio-Lite luciferase assay reagent (Vazyme) was added and transferred to a ViewPlate-96 White, Clear bottom, TC-treated (Perkin Elmer) and luminescence was measured using a microplate reader.

[0474] To verify the functionality of the assay system a commercially available anti-CD20/anti-CD3 bispecific, Mosunetuzumab (Biointron), was used as a positive assay control to directly bridge Raji B cells to Jurkat T cells while cells alone or with Rituximab were used as negative controls. FIG. 11 shows that there is no statistical difference between cells alone and cells+Rituximab indicating that Rituximab alone is not capable of bridging B cells to T cells. In contrast, Mosunetuzumab at every concentration evaluated was statistically significantly different from cells alone which is expected given it was specifically designed to bridge CD20+ cells with CD3+ T cells.

[0475] Next, IgRs at 0.1, 1 and 10 nM were evaluated for their ability to bridge CD20+ Raji B cells with T cells and mediate T cell activation with and without the presence of 1 nM Rituximab and with Mosunetuzumab run as a positive control (FIG. 12). As shown in FIG. 13, FIG. 14 and FIG. 15, all 6 designs were capable of driving T cell activation when combined with Rituximab versus without. FIG. 13 shows that the anti-TCR V700 fusion exhibited a lower potency than the anti-CD3 TR66 or anti-CD3 HzUCHT1 fusions and the TR66 fusion exhibited a slightly higher potency than HzUCHT1 indicative of the importance to optimize around the T cell target, the epitope within a T cell target and the affinity against that T cell target. FIG. 14 shows that the IgR designs with half-life extension strategies such as fusion to an anti-HSA VHH or fusion to an IgG Fc with FcR KO mutations show similar potencies indicating that the addition of a VHH at the N-terminal end of the FcγRIIIA region did not interfere with Rituximab IgG-Fc binding and the fusion of an Fe to the C-terminus of the FcγRIIIA region did not interfere with Rituximab IgG-Fc binding. FIG. 15 shows that using an anti-Fc VHH instead of an Fc-receptor such as FcγRIIIA can mediate a higher potency indicating the epitope, affinity and stoichiometry of the Fc-binding domain towards the IgG-Fc are important parameters to optimize (for example FcγR:IgG stoichiometry is 1:1 while anti-Fc VHH:IgG stoichiometry could be 2:1 or 1:1 depending on the epitope). Additionally, most of the IgRs evaluated exhibited maximum luminescence values similar to that of Mosunetuzumab indicating IgRs in combination with target cell specific immunoglobulin are capable of mediating T cell activity similar to that of a traditional T cell engager (TCE).

### Example 9. Redirecting T Cells to Solid Cancer Cells by Combining Anti-HER2 IgG with IgRs Targeting CD3 or TCR

[0476] To evaluate the ability of the Fc-binding T cell engaging (FcB-TCE) IgRs to bridge blood cancer cells to T cells a HER2+ SKBR3 cell and CD3/TCR+ Jurkat-CD28-NFAT-Luc co-culture reporter system was employed as displayed in FIG. 10. Commercially available anti-HER2 Trastuzumab IgG1 (Biointron) was used to opsonize HER2+ SKBR3 cells and bridge to T cells via various IgR proteins including FcγR3A/ScFv-HzUCHT1 fusion (SEQ ID NO: 28); FcγR3A/ScFv-TR66 fusion (SEQ ID NO: 33); FcγR3A/VHH-V700 fusion (SEQ ID NO: 36); αHSA-VHH/FcγR3A/αCD3-ScFv fusion (SEQ ID NO: 39); FcγR3A-Fc/SP34-Fc heterodimer (SEQ ID NO: 41, SEQ ID NO: 44, SEQ ID NO: 47); and an aFc-VHH/ScFv-HzUCHT1 fusion (SEQ ID NO: 50).

[0477] The bioassay was performed by (1) collecting SKBR3 and culturing overnight at 37C in 100 ul per well in complete medium at 1E5 cells/mL; (2) the next day resuspending with Jurkat-CD28-NFAT-luc at 1E6 cells/mL in 50 ul; (3) 25 uL Rituximab (negative control), Trastuzumab or culture medium, RPMI 1640 (Corning)+1% Fetal Bovine Serum (BI), was added into wells, the working concentrations of Rituximab or Trastuzumab were 4× the final target concentration of 1 nM, 25 ul f IgR was used at 4× the final target concentrations of 0.1, 1 and 10 nM; (5) cells and proteins were mixed gently and incubated in the plate at 37° C. for 6 h; (6) after incubation, 100 μl of Bio-Lite luciferase assay reagent (Vazyme) was added and transferred to a ViewPlate-96 White, Clear bottom, TC-treated (Perkin Elmer) and luminescence was measured using a microplate reader.

[0478] IgRs at 0.1, 1 and 10 nM were evaluated for their ability to bridge HER2+ SKBR3 breast cancer cells with T cells and mediate T cell activation with the presence of 1 nM Trastuzumab and avoid T cell activation in the presence of anti-CD20 Rituximab. As shown in FIG. 17, FIG. 18, FIG. 19A, and FIG. 19B, all 6 designs were capable of driving more T cell activation when combined with Trastuzumab versus an SKBR3 cancer cell line irrelevant IgG, Rituximab, given SKBR3 cells lack CD20. FIG. 16 shows that the anti-TCR V700 fusion exhibited lower potency than the anti-CD3 TR66 or anti-CD3 HzUCHT1 fusions and the TR66 fusion exhibited a higher potency than HzUCHT1 indicative of the importance to optimize around the T cell target, the epitope within a T cell target and the affinity against that T cell target. FIG. 17 shows that the IgR designs with half-life extension strategies such as fusion to an anti-HSA VHH or fusion to an IgG Fc with FcR KO mutations show similar potencies indicating that the addition of a VHH at the N-terminal end of the FcγRIIIA region did not interfere with Trastuzumab IgG-Fc binding and the fusion of an Fc to the C-terminus of the FcγRIIIA region did not interfere with Trastuzumab IgG-Fc binding. FIG. 18 shows that using an anti-Fc VHH instead of an Fc-receptor such as FcγRIIIA can mediate a higher potency indicating the epitope, affinity and stoichiometry of the Fc-binding (FcB) region towards the IgG-Fc are important parameters to optimize (for example FcγR:IgG stoichiometry is 1:1 while anti-Fc VHH:IgG stoichiometry could be 2:1 or 1:1 depending on the epitope). The ability of IgRs in combination with Rituximab in Example 8 and Trastuzumab in Example 9 being able to activate T cells across both blood and solid tumor cancer cells and across 2 different antigen target indicates IgRs can function broadly and independent of the immunoglobulin target antigen and target cell type.

### Example 10. Expression, Purification and Evaluation of FcγR Variants Fused to αCD3

[0479] Fc-binding heterologous polypeptides can be expressed and purified as described in Example 1.

[0480] The extracellular domain of the human CD16A Fc-receptor (FcγR3A-V158, SEQ ID NO: 1) can be shortened by removal of 15 amino acids on the C-terminus (FcγR3AV-short, SEQ 3), this can then be fused via a (G4S)₃ linker to: a humanized version of an αCD3 ScFv clone HzUCHT1 in the VL-VH orientation using a (G4S)₃ linker to form a FcγR3AV-short/ScFv-HzUCHT1 fusion (SEQ ID NO: 75, SEQ ID NO: 76) as depicted in FIG. 2A. The extracellular domain of the human CD16A Fc-receptor (FcγR3A-V158, SEQ ID NO: 1) with an S197P mutation (FcγR3AV-S197P) and replacing LVGSKNV in domain 2 of FcγR3A with MGKHRY from FcγR1 (SEQ 77), can be fused via a (G4S)₃ linker to: a humanized version of an αCD3 ScFv clone HzUCHT1 in the VL-VH orientation using a (G4S)₃ linker to form a FcγR3A-MGKHRY/ScFv-HzUCHT1 fusion (SEQ ID NO: 78, SEQ ID 79) as depicted in FIG. 2A. The extracellular domain of the human CD64 Fc-receptor (FcγR1, SEQ ID NO: 12) can be truncated to remove domain 3 (FcγR1-D1-D2, SEQ 80), fused via a (G4S)₃ linker to: a humanized version of an αCD3 ScFv clone HzUCHT1 in the VL-VH orientation using a (G4S)₃ linker to form a FcγR1-D1-D2/ScFv-HzUCHT1 fusion (SEQ ID NO: 81, SEQ ID NO: 82) as depicted in FIG. 2A. The extracellular domain of the human CD32A Fc-receptor (FcγR2A-H131, SEQ ID NO: 9) can be fused via a (G4S)₃ linker to: a humanized version of an αCD3 ScFv clone HzUCHT1 in the VL-VH orientation using a (G4S)₃ linker to form a FcγR2AH/ScFv-HzUCHT1 fusion (SEQ ID NO: 83, SEQ ID 84) as depicted in FIG. 2A. The extracellular domain of the human CD32B/C Fc-receptor (FcγR2BC, SEQ ID NO: 11) can be fused via a (G4S)₃ linker to: a humanized version of an αCD3 ScFv clone HzUCHT1 in the VL-VH orientation using a (G4S)₃ linker to form a FcγR2BC/ScFv-HzUCHT1 fusion (SEQ ID NO: 85, SEQ ID NO: 86) as depicted in FIG. 2A. The extracellular domain of the mouse Fc-receptor RIV (FcγRIV, SEQ ID NO: 8) can be fused via a (G4S)₃ linker to: a humanized version of an αCD3 ScFv clone HzUCHT1 in the VL-VH orientation using a (G4S)₃ linker to form a FcγR2BC/ScFv-HzUCHT1 fusion (SEQ ID NO: 87, SEQ ID NO: 88) as depicted in FIG. 2A.

[0481] Optionally, other anti-CD3, anti-TCR or other immune cell surface polypeptide binding domains could be used and fused to the FcγR variants described herein. Optionally, the FcγR described herein could be fused in a Fab format with or without lipid conjugation or an Fc fusion format. The function of the IgRs with or without tumor targeting IgGs could be evaluated using a reported assay as described in Examples 8 and 9 or using cytotoxicity assays with primary immune cells.

### Example 11. Expression and Purification of FcγR/αCD3 Multimeric Proteins in Various Fab Formats

[0482] Fc-binding multimeric proteins can be expressed and purified as described in Example 1 or optionally a Protein A (for VH3 family heavy chain), Protein L (for VL1, VL3, VL4 family light chain) or anti-CH1 (for any family) affinity chromatography could be employed.

[0483] The constant heavy chain CH1 region of a human IgG and optionally some of the hinge (CH1 SEQ ID 89) and the constant kappa light chain (kappa SEQ ID NO: 90) and optionally lambda (LC1 SEQ ID NO: 91, LC2 SEQ ID NO: 92, LC3 SEQ ID NO: 93, LC7 SEQ ID NO: 46), when appropriate, can be fused with VH and VL, respectively, of immune cell surface targeting antigen binding domains. Optionally, the interchain disulfide forming Cysteines on the constant heavy chain (C233S, CH1-NoDS SEQ ID NO: 94) and constant light chain (C214S, kappaNoDS SEQ ID NO: 95, hLC1NoDS SEQ ID NO: 96, hLC2NoDS SEQ ID NO: 97, hLC3NoDS SEQ ID NO: 98, hLC7NoDS SEQ ID NO: 99) to Serine or the like. Optionally, in addition to mutating the interchain disulfide forming Cysteines to Serine or the like, additional buried disulfide forming cysteines could be introduced in both the constant heavy chain (F174C and C233S, CH1-bDS SEQ ID NO: 100) and constant light chains (S176C and C214S, kappabDS SEQ ID NO: 101, hLC1bDS SEQ ID NO: 102, hLC2bDS SEQ ID NO: 103, hLC3bDS SEQ ID NO: 104, hLC7bDS SEQ ID NO: 105).

[0484] The VH/VL pair of HzUCHT1 can be fused to the CH1 heavy chain and kappa light chain with the extracellular domain of Fc receptor such as FcγR3AV fused to the C-terminus of the constant light chain as depicted in FIG. 5A or optionally or additionally the constant heavy chain via a (G4S)₃ linker as depicted in FIG. 5B (CH1NoDS-HzUCHT1, SEQ ID NO: 106, CH1NoDS-HzUCHT1/FcγR3AV-short, SEQ ID NO: 107, kappaNoDS-HzUCHT1/FcγR3AV-short, SEQ ID NO: 108) or optionally the N-terminus of the variable heavy chain or variable light chain via a (G4S)₃ linker. FcγR3AV can be fused to the N-terminus of the CH1 domain and optionally with HzUCHT1 ScFv fused to the C-terminus and co-expressed with constant light chain with HzUCHT1 ScFv fused to the C-terminus and optionally with FcγR3AV fused to the N-terminus as depicted in FIGS. 5D, 5E, 5F and 5G (FcγR3AV-short/CH1bDS SEQ ID NO: 109, FcγR3AV-short/CH1bDS/ScFv-HzUCHT1 SEQ ID NO: 110, kappabDS/ScFv-HzUCHT1 SEQ ID NO: 111, FcγR3AV-short/kappabDS/ScFv-HzUCHT1: 112). The function of the IgRs with or without tumor targeting IgGs could be evaluated using a reported assay as described in Examples 8 and 9 or using cytotoxicity assays with primary immune cells.

### Example 12. Expression, Purification and Lipid Conjugation of FcγR/αCD3 Multimeric Polypeptides in Various Fab Formats

[0485] Fc-binding multimeric proteins can be expressed and purified as described in Example 11.

[0486] The constant heavy CH1 domain with the native hinge region up the first cysteine and with the interchain disulfide mutated to Serine (C233S, CH1-NoDS-Cys SEQ ID NO: 113) or the like can be paired with the NoDS light chain sequences and VH/VL pairs against immune cell surface proteins as described in Example 11. Optionally, the constant heavy CH1 domain with the native hinge region up the first cysteine and with the interchain disulfide mutated to Serine can have an additional mutation introduced in both the heavy chain (F174C and C233S, CH1-bDS-Cys SEQ ID NO: 114) and light chain sequences to generate Fabs with buried disulfides as described in Example 11. PEG-lipid can be covalently attached to the C-terminal cysteine on the constant heavy chain as depicted in FIG. 6A, FIG. 6B, FIG. 6C, FIG. 6D, FIG. 6F, FIG. 6G or the C-terminal cysteine of an ScFv as depicted in FIG. 6E.

[0487] The VH/VL pair of HzUCHT1 can be attached to their corresponding CH1 heavy chain and kappa light chain and fused to an immunoglobulin binding domain such as FcγR3AV at the C-terminus of the constant heavy chain via a (G4S)₃ linker (HzUCHT1-CH1NoDS-Cys, SEQ ID NO: 115, HzUCHT1-CH1bDS-Cys, SEQ ID NO: 116, FcγR3AV-short/kappaNoDS-HzUCHT1, SEQ ID 108, FcγR3AV-short/kappabDS-HzUCHT1, SEQ ID NO: 117) as depicted in FIG. 6A. The function of the IgRs with or without tumor targeting IgGs could be evaluated using a reported assay as described in Examples 8 and 9 or using cytotoxicity assays with primary immune cells.

[0488] After expression and purification of a Fab fusion with a C-terminal cysteine, lipid conjugation can be performed. First, make a stock of Maleimide-PEG2K-DSPE/MeOH-PEG2K-DSPE, dissolve Maleimide-PEG2K-DSPE to 3.4 mM (10 mg/L) in 1 mM Citrate pH 6.7, dissolve MeOH-PEG2K-DSPE to 3.4 mM (9.54 mg/mL) in 1 mM Citrate pH 6.7. These stocks can be frozen and stored at −80C individually or after mixing at desired molar ratio. For a 2:3 Mal:MeOH, given the stocks are both at 3.4 mM one can perform volumetric ratio mixing, for instance 200 ul of Mal stock+300 ul MeOH stock would get you 500 ul at a 2:3 molar ratio. If the Fab is not around 3 mg/mL already, concentrate the protein with a 10 kD ultracel regenerated cellulose membrane or the like, use fresh PBS for recovery, spike with 0.5 M EDTA pH 7.5 for final of PBS+5 mM EDTA pH 7.5.

[0489] For the reduction, dissolve TCEP to 100 mM in PBS+5 mM EDTA, spike TCEP concentrate for final concentration of around 0.2 mM in protein solution, reduce at room temp for around 1.5 hr. After reduction, use a 40K Zeba desalting column to remove free cysteine or other small molecules and exchanging the Fab into PBS+5 mM EDTA. After Zeba, take A280 by nanodrop or the like and calculate protein concentration so one can calculate how much Mal-PEG-DSPE/MeOH-PEG-DSPE to add for around 2:1 ratio of MAL:Protein, this is equivalent to PEG-DSPE to protein ratio of around 5:1.

[0490] For the reaction, add protein to MAL/MeOH mixture, pipette mix, incubate for around 3 hr at 37° C. After reaction, spike 1:10 v/v with 15 mM Cysteine (for final of 1.5 mM cysteine post dilution), incubate around 15 min 37° C. to quench unreacted Mal-PEG-DSPE.

[0491] For purification, dilute with 25 mM HEPES 150 mM NaCl pH 7.5 (HBS), concentrate with 100 kD UF membrane, dilute >25×, repeat for serial concentration/dilution 3 times, this lets unreacted protein pass through the filter while lipid conjugated protein micelles get retained. Carefully recover protein-micelles from membrane, with 1-2 washes using 10-15 ul, ideally final volume is only 35-50 ul, measure volume by pipette, measure A280 by nanodrop or cuvette material can be recovered from. Run SDS-PAGE with original material non-reduced and reduced and final conjugate reduced, one should see a shift in the heavy chain band between the conjugated Fab and PEG-lipid conjugated Fab. Optionally, a similar PEG-lipid conjugation and purification procedure can be performed when a Fc-binding-domain/ScFv fusion protein contains a C-terminal cysteine.

### Example 13. Expression and Purification of Multiple-FcRs or Fc-Binding Domains Fused to αCD3

[0492] Fc-binding heterologous polypeptides and heteromultimeric proteins can be expressed and purified as described in Example 1 and Example 11.

[0493] Multiple immunoglobulin-binding domains of the same type or different types can be fused with an ScFv or Fab against an immune cell surface protein (as depicted in 4D, 4E, 4F, 4G) optionally with or without an half-life extension domain such as anti-HSA (as depicted in FIG. 3B) or in an Fc-Fc heterodimeric protein format. FcγR3A can be fused to a HzUCHT1 ScFv followed by another FcγR3A (FcγR3AV-short/ScFv-HzUCHT1/FcγR3AV-short, SEQ ID NO: 118) as depicted in FIG. 2C with an optional domain order. FcγR2A can be fused to a HzUCHT1 ScFv followed by FcγR3A (FcγR2AH131/ScFv-HzUCHT1/FcγR3AV-short, SEQ ID NO: 119) as depicted in FIG. 2C with an optional domain order. FcαRI can be fused to a FcγR3A followed by HzUCHT1 ScFv (FcαRI/FcγR3AV-short/ScFv-HzUCHT1, SEQ ID NO: 120) as depicted in FIG. 2C. Two tandem domain 1 of FcαRI can be fused to HzUCHT1 ScFv (FcαRI-D1/FcαRI-D1/ScFv-HzUCHT1, SEQ ID NO: 121) as depicted by FIG. 2C and optionally with FcγR3A. Anti-Fc VHH can be fused to another anti-Fc followed by HzUCHT1 ScFv (anti-Fc/anti-Fc/ScFv-HzUCHT1, SEQ ID NO: 122) as depicted in FIG. 2C. Anti-Fc VHH can be fused to a FcγR3A followed by HzUCHT1 ScFv (anti-Fc/FcγR3AV-short/ScFv-HzUCHT1, SEQ ID NO: 123) as depicted in FIG. 2C. FcγR3A can be fused to the C-terminus of CH1/HzUCHT1 heavy chain (CH1-HzUCHT1/FcγR3AV-short, SEQ ID NO: 124) and the C-terminus of the kappa/HzUCHT1 light chain (kappa-HzUCHT1/FcγR3AV-short, SEQ ID NO: 125) as depicted in FIG. 5B. FcγR3A can be fused to the N-terminus of IgG1-LALAPA-knob Fc forming FcγR3AV-short/Fc-LALAPA-knob, SEQ ID NO: 126 and optionally the N-terminus of a ScFv-HzUCHT1-Fc-LALAPA-hole SEQ ID 128 forming FcγR3AV-short/kappa-HzUCHT1-Fc-LALAPA-hole, SEQ ID NO: 129 to produce a hetero-multimeric proteins with one or two immunoglobulin binding domains as depicted in FIG. 4C and FIG. 4D. The function of the IgRs with or without tumor targeting IgGs and/or IgAs when appropriate could be evaluated using a reported assay as described in Examples 8 and 9 or using cytotoxicity assays with primary immune cells.

[0494] FcγR3A can be fused to the C-terminus via a (G4S)₃ linker to a partial human IgG1 heavy chain with mutations: C233S to prevent disulfide formation; T366S, L368A, Y407V to produce the “hole” Fc heavy chain; and L234A, L235A and P329A to ablate Fc receptor binding; forming an FcγR3A-Fc polypeptide (FcγR3A-short/hIgG1-Fc-LALAPA-hole SEQ ID NO: 41). The other heavy chain can comprise of a variable heavy chain for the αCD3 clone HzUCHT1 and a human IgG1 constant heavy chain with mutations: T366W to produce the “knob” Fc heavy chain; and L234A, L235A and P329A to ablate Fc receptor binding; forming an HzUCHT1 human IgG1 heavy chain (HzUCHT1-HC-Fc-LALAPA-knob, SEQ ID NO: 127. The light chain comprised of a variable light chain for the αCD3 clone HzUCHT1 and a human constant kappa light chain with an FcγR3AV fused to the C-terminus via a (G4S)3 linker forming an HzUCHT1 human light chain FcγR3AV fusion (kappa-HzUCHT1/FcγR3AV-short, SEQ ID NO: 125) as depicted in FIG. 4G. Expression of these 3 chains would produce a hetero-multimeric protein with two immunoglobulin-binding domains.

[0495] Using a Fab format, FcγR3A can be fused to the C-terminus a of a CH1 (CH1-HzUCHT1/FcγR3AV-short, SEQ ID NO: 124) and the C-terminus of a constant light chain (kappa-HzUCHT1/FcγR3AV-short, SEQ ID NO: 125) to form a hetero-multimeric protein with two immunoglobulin domains as depicted in FIG. 5B.

### Example 14. Expression and Purification of Immunoglobulin Binding Domains Fused to αCD3

[0496] Immunoglobulin-binding heterologous polypeptides and heteromultimeric proteins can be expressed and purified as described in Example 1 and Example 11.

[0497] Immunoglobulin binding domains such as anti-CH1 VHH (VHH-CH128 SEQ ID 130) can be fused to various immune cell binding domains with specificity towards CD3, TCR or other immune cell surface polypeptides using a (G4S)₃ linker to form VHH-CH128/ScFv fusions. Fusing the anti-CD3 HzUCHT1 ScFv to the CH128 VHH via a (G4S)₃ linker forms CH128/ScFv-HzUCHT1 SEQ ID NO: 131. An avimer against the Fc region of an IgG (AVIG SEQ ID 132) can be fused to HzUCHT1 ScFv to form AVIG/ScFv-HzUCHT1 SEQ ID NO: 133. An anti-IgG VH/VL pair (17F12 VH SEQ ID NO: 134, 17F12 VL SEQ ID NO: 135) can be fused to an immune cell targeting domain in the form of an ScFv (ScFV-17F12 SEQ ID 136) forming ScFv-17F12/ScFv-HzUCHT1: 137 or optionally as a Fab with one immune cell targeting domain attached to the C-terminus of the light constant light chain, heavy chain or both (CH1-NoDS-17F12 SEQ ID NO: 138, CH1-NoDS-17F12/ScFv-HzUCHT1 SEQ ID NO: 140, kappaNoDS-17F12/ScFv-HzUCHT1 SEQ ID NO: 141) as depicted in FIG. 5C and FIG. 5H or an Fc fusion with one or multiple point mutations in the constant heavy chain to significantly reduce 17F12 binding as depicted in FIG. 4A where the IgBD is a whole Fab comprising the 17F12 VH/VL pair attached to their corresponding constant heavy and light chains. Optionally, an anti-IgG Fab with one immune cell targeting domain attached to the C-terminus of the light constant light chain (CH1-NoDS-17F12-Cys SEQ ID NO: 139, kappaNoDS-17F12/ScFv-HzUCHT1 SEQ ID NO: 141) can be conjugated to an lipid via free cysteine at or near the C-terminus as depicted in FIG. 6B. The function of the IgRs with or without tumor targeting IgGs could be evaluated using a reported assay as described in Examples 8 and 9 or using cytotoxicity assays with primary immune cells.

### Example 15. Expression and Purification of FcγR Fused to αCD3 and αTCR

[0498] Fc-binding heterologous polypeptides can be expressed and purified as described in Example 1.

[0499] An immunoglobulin-binding domain such as the extracellular domain of the human CD16A Fc-receptor with an S197P mutation (FcγR3AV-S197P SEQ ID 23) or optionally with 15 amino acids removed from the C-terminus, can be fused to various VH/VL pairs with specificity towards CD3 and TCR using a (G4S)₃ linker to form FcγR3AV-ScFv fusions: anti-CD3 Hu291 (Hu291-VH SEQ: 142, Hu291-VL SEQ ID NO: 143, ScFv-Hu291 SEQ ID NO: 144, FcγR3AV-short/ScFv-Hu291 SEQ ID NO: 145), anti-CD3 huCLB-T3/4.A (huCLB-VH SEQ ID NO: 146, huCLB-VL SEQ ID NO: 147, ScFv-huCLB SEQ ID NO: 148, FcγR3AV-short/ScFv-huCLB SEQ ID NO: 149), anti-CD3 HuYTH 12.5 (12.5-VH SEQ ID NO: 150, 12.5-VL SEQ ID NO: 151, ScFv-12.5 SEQ ID NO: 152, FcγR3AV-short/ScFv-12.5 SEQ ID NO: 153), anti-CD3 TR66-high affinity (TR66HF-VH SEQ ID NO: 154, TR66HF-VL SEQ ID NO: 155, ScFv-TR66HF SEQ ID NO: 156, FcγR3AV-short/ScFv-TR66HF SEQ ID NO: 157), anti-CD3 G19-4 (G19-4-VH SEQ ID NO: 158, G19-4-VL SEQ ID NO: 159, ScFv-G19-4 SEQ ID NO: 160, FcγR3AVshort/ScFv-G19-4 SEQ ID NO: 161), anti-CD3 BC3 (BC3-VH SEQ ID NO: 162, BC3-VL SEQ ID NO: 163, ScFv-BC3 SEQ ID NO: 164, FcγR3AV-short/ScFv-BC3 SEQ ID NO: 165), anti-CD3 Hz06 (Hz06-VH SEQ ID NO: 166, Hz06-VL SEQ ID NO: 167, ScFv-Hz06 SEQ ID NO: 168, FcγR3AV-short/ScFv-Hz06 SEQ ID NO: 169), anti-CD3 Ly17.2G3 (Ly17-VH SEQ ID NO: 170, Ly17-VL SEQ ID NO: 171, ScFv-Ly17 SEQ ID NO: 172, FcγR3AV-short/ScFv-Ly17 SEQ ID NO: 173), anti-TCR TOL-101 (TOL-VH SEQ ID NO: 174, TOL-VL SEQ ID NO: 175, ScFv-TOL SEQ ID NO: 176, FcγR3AV-short/ScFv-TOL SEQ ID NO: 177), anti-TCR hJOV1 (hJOV1-VH SEQ ID NO: 178, hJOV1-VL SEQ ID NO: 179, ScFv-hJOV1 SEQ ID NO: 180, FcγR3AVshort/ScFv-hJOV1 SEQ ID NO: 181), anti-TCR BMA-031 (BMA-VH SEQ ID NO: 182, BMA-VL SEQ ID NO: 183, FcγR3AV-short/ScFv-BMA SEQ ID NO: 184). Optionally, the VH/VL pairs in this example or other examples could be incorporated in an Fc fusion format as described in Example 3 or a Fab format with or without a C-terminal and with or without lipid conjugation as described in Examples 11 and 12. The function of the IgRs with or without tumor targeting IgGs could be evaluated using a reported assay as described in Examples 8 and 9 or using cytotoxicity assays.

### Example 15. Expression and Purification of FcγR Fused to Co-Stimulation, Immune Checkpoint and Immune Suppression Targets on T Cells

[0500] Fc-binding heterologous polypeptides and heteromultimeric proteins can be expressed and purified as described in Example 1 and Example 11.

[0501] Immunoglobulin-binding domain Fc fusions can be expressed with immune cell binding domain Fc proteins to generate multiple hetero-multimeric proteins with 1 to 2 immunoglobulin-binding domains combined with 1 to 2 immune cell binding domains as depicted in FIG. 4A, FIG. 4B, FIG. 4C, FIG. 4D, FIG. 4E, FIG. 4F, FIG. 4G, FIG. 4H, FIG. 4I, and FIG. 4J. 3 polypeptide chains can assemble into one soluble protein comprising two heterodimer forming heavy chains be assembled using knob-in-hole mutations and a light chain that assembles with one of the two heterodimeric heavy chains. One heavy chain can comprise of an immunoglobulin binding domain such as human CD16A Fc-receptor fused via a (G4S)₃ linker to a partial human IgG1 heavy chain with mutations: C233S to prevent disulfide formation; T366S, L368A, Y407V to produce the “hole” Fc heavy chain; and L234A, L235A and P329A to ablate Fc receptor binding; forming an FcγR3A-Fc polypeptide. The other heavy chain can comprise of a variable heavy chain of various T cell co-stim and immune checkpoint targeting clones (anti-CD137 5B9, Urelumab, P566 (Utomilumab), Hz4B4-2; anti-CD28 2E12, TGN1412, 9.3; anti-PD1 Nivolumab, Pembrolizumab; anti-CTLA4 Ipilizumab; anti-CD11 a hMHRM24; anti-CD18 rhuMab) and a human IgG1 constant heavy chain with mutations: T366W to produce the “knob” Fc heavy chain; and L234A, L235A and P329A to ablate Fc receptor binding. The light chain can comprise of the corresponding variable light chains of various T cell co-stim and immune checkpoint targeting clones and a human constant kappa or lambda light chain as appropriate. Optionally, these T cell co-stimulation or immune checkpoint targeting clones can be produced as ScFvs and fused to the C-terminus or N-terminus of an immunoglobulin binding domain, the light chain of an another T cell targeting Fab or Fc-fusion or an anti-T cell targeting ScFv such as anti-CD3 or TCR can be fused to the C-terminal light chain of an anti-T cell immune checkpoint or costimulation light chain for example CH1NoDS-17F12/ScFv-9.3 SEQ ID NO: 220, kappaNoDS-17F12/ScFv-HzUCHT1 SEQ ID NO: 141, FIG. 5H; FcγR3AV-short/CH1bDS/ScFv-9.3 SEQ ID NO: 221, kappabDS/ScFv-HzUCHT1 SEQ ID NO: 111, FcγR3AV-short/kappabDS/ScFv-HzUCHT1 SEQ ID 112 FIG. 5F, FIG. 5G). The function of the IgRs with or without tumor targeting IgGs could be evaluated using a reported assay as described in Examples 8 and 9 or using cytotoxicity or activation assays with primary immune cells.

### Example 16. Expression and Purification of FcγR Fused to Effector Function, Co-Stimulation, Immune Checkpoint Targets on Myeloid, B Cells and NK Cells

[0502] Fc-binding heterologous polypeptides and heteromultimeric proteins can be expressed and purified as described in Example 1 and Example 11.

[0503] Immunoglobulin binding domains such as Fc receptors, anti-Fc, anti-CH1 and anti-IgG can be fused to immune cell surface polypeptide binding domains on Myeloid cells, B cells and NK cells in an ScFv fusion format or optionally can be could be incorporated in an Fc fusion format as described in Example 3 (with mutations to knock out anti-CH1 or anti-IgG binding as appropriate) or a Fab format (with mutations to knock out anti-CH1 or anti-IgG binding as appropriate) with or without a C-terminal and with or without lipid conjugation as described in Examples 11 and 12. The function of the IgRs with or without tumor targeting IgGs can be evaluated using reporter assays similar to those in Example 8 and 9, primary cell activation assays, cytotoxicity assays or phagocytosis assays. FcγR3a can be fused to anti-CD89 VH/VL pairs (14A8, A77, 8D2) to target Myeloid cells. FcγR3a can be fused to anti-CD40 VH/VL pair (40.2.220), CD40L, anti-CD79 (SN8, 2F2) to target B cells. FcγR3a can be fused to anti-NKp46 VH/VL pair (NKp46-1, NKp46-4) to target NK cells.

### Example 17. Expression and Purification of Half-Life Extension Domains Fused to Immunoglobulin-Binding and Immune Cell Binding Domains

[0504] Fc-binding heterologous polypeptides and heteromultimeric proteins can be expressed and purified as described in Example 1 and Example 11.

[0505] Anti-HSA or HSA can be fused to the N or C terminus or optionally between immunoglobulin binding domains and immune cell binding domains as depicted in FIG. 3A, FIG. 3B, and FIG. 3C. Anti-HSA VHH or HSA (SEQ ID NO: 266) can be fused to the C-terminus of FcγR3A fused to anti-CD3 ScFv UCHT1 fused to another FcγR3A to form anti-HSA/FcγR3A/ScFv-HzUCHT1/FcγR3A SEQ ID NO: 267 and HSA/FcγR3A-short/ScFv-HzUCHT1/FcγR3A SEQ ID NO: 268. HSA can also be fused to FcγR3A-short/ScFv-HzUCHT1 to form HSA/FcγR3A-short/ScFv-HzUCHT1 SEQ ID 269. Optionally, anti-HSA can be fused to one immunoglobulin-binding domain and two immune cell binding domains (anti-HSA/FcγR3A/ScFv-HzUCHT1/ScFv-9.3 SEQ ID NO: 270)

### Example 18. Expression, Purification and Evaluation of FcγR Variants, IgG Binding Variants and Multimeric Proteins in Various Formats Fused to αCD3

[0506] IgG-binding heterologous polypeptides and heteromultimeric proteins can be expressed and purified as described in Example 1 and Example 11. IgG-binding multimeric proteins can be expressed and purified as described in Example 1 or optionally a Protein A (for VH3 family heavy chain), Protein L (for VL1, VL3, VL4 family light chain) or anti-CH1 (for any family) affinity chromatography could be employed.

[0507] The FcγR3AV-short/ScFv-HzUCHT1-his fusion (JIB15, SEQ ID NO: 76), FcγR3A-MGKHRY/ScFv-HzUCHT1-his fusion (JIB16, SEQ ID 79), FcγR1-D1-D2/ScFv-HzUCHT1 fusion (JIB17, SEQ ID NO: 82), FcγR2AH/ScFv-HzUCHT1-his fusion (JIB18, SEQ ID 84) and FcγR2BC/ScFv-HzUCHT1 fusion (JIB23, SEQ ID NO: 86) from Example 10 were produced as well as the VHH-CH128/ScFv-HzUCHT1-his fusion using SEQ ID NO: 131, and SEQ ID NO: 21 from Example 14 was produced as JIB21 (SEQ ID NO: 278) as depicted in FIG. 2A.

[0508] The VH of HzUCHT1 was fused to the CH1 heavy chain and his tag (CH1NoDS-HzUCHT1 SEQ ID NO: 106; his SEQ ID NO: 21) forming CH1NoDS-HzUCHT1-his (SEQ: ID 279) and the VL of HzUCHT1 was fused to the kappa light chain (kappaNoDS, SEQ ID NO: 108) with the extracellular domain of Fc receptor FcγR3AV-S197P (SEQ ID NO: 23) fused to the C-terminus of the constant light chain via a (G4S)₃ (kappaNoDS-HzUCHT1-FcγR3AV-S197P, SEQ ID NO: 280) as depicted in FIG. 5A to form JIB19 (SEQ ID NO: 279 and SEQ ID NO: 280) or optionally or additionally the constant heavy chain via a (G4S)₃ linker making CH1NoDS-HzUCHT1-FcγR3AV-S197P-his, SEQ ID NO: 281 (CH1NoDS-HzUCHT1 SEQ ID NO: 106; FcγR3AV-S197P SEQ ID NO: 23, his SEQ ID NO: 21) as depicted in FIG. 5B to form JIB20 (SEQ ID 280, SEQ ID 281).

[0509] The anti-IgG clone 17F12, a known human IgG1, IgG2, IgG3 and IgG4 binder that cross reacts with non-human primate IgG, was fused to human CH1 heavy chain (SEQ ID 138) with a his tag (SEQ ID 21) formed CH1NoDS-17F12-his (SEQ ID 282) and kappa light chain (kappaNoDS-17F12, SEQ ID NO: 112) and a humanized version of an αCD3 ScFv clone HzUCHT1 in the VL-VH orientation using a (G4S)₃ linker was fused to the C-terminus of the constant light chain via (G4S)₃ linker to form kappaNoDS-17F12/ScFv-HzUCHT1 (SEQ ID NO: 141) generating to heterodimeric polypeptide, JIB22 (SEQ ID NO: 282, SEQ ID NO: 141) as depicted in FIG. 5C.

[0510] FIG. 19A, FIG. 19B, and FIG. 20 and Table 8 show the proteins were well expressed and were of high to reasonable purity by SDS-PAGE and SEC with exception of JIB16 and JIB22 where their % Monomer by SEC was 4.3% and 13.3% respectively. Interestingly, when comparing their SDS-PAGE profiles, it can be observed that the anti-IgG 17F12 molecule, JIB22, has laddering even when the sample was reduced and denatured which indicates that the binding regions of the VH/VL pair may be binding a portion a constant region.

TABLE 8
Protein Expression and % Monomer by
SEC for IgR produced in Example 18.

| Protein | CHO (mg/L) | SEC % Monomer |
|---|---|---|
| JIB15 | 215 | 69.6% |
| JIB16 | 91 | 4.3% |
| JIB17 | 11 | 96.0% |
| JIB18 | 88 | 74.6% |
| JIB19 | 170 | 89.4% |
| JIB20 | 184 | 84.9% |
| JIB21 | 58 | 67.0% |
| JIB22 | 70 | 13.3% |
| JIB23 | 101 | 63.8% |

[0511] Next, IgRs at 0.1 and 1 nM were evaluated for their ability to bridge CD20+ Raji B cells with T cells and mediate T cell activation in the presence of 1 nM Rituximab, avoid T cell activation in the presence of 1 nM Trastuzumab or with Mosunetuzumab run as a positive control (FIG. 21) using the method described in Example 8. The use of FcγR3A-short in JIB15 did not reduce its potency when compared to the non-truncated FcγR3A form in JIB1 indicating a FcγR3A amino acids near the C-terminus of the extracellular domain, including the lacking the ADAM17 cleavage site are not necessary for IgG binding. The FcγR2A (JIB18), FcγR2BC (JIB23), and anti-CH1 VHH (JIB21) comprising fusions were able to mediate T cell activation in the presence of Rituximab that was substantially greater than in the presence of Trastuzumab indicating IgRs can leverage multiple Fc receptor types that would block cognate immunoglobulin Fc receptor engagement in vivo and IgRs can leverage IgG binders that would not block cognate immunoglobulin Fc receptor engagement in vivo. In contrast, to the FcγR2A-based JIB18 and FcγR2BC-based JIB23, the similarly designed IgR comprising FcγR1 lacking domain 3 (JIB17) did not mediate substantial Rituximab signal over background activation with Trastuzumab indicating the removal of domain 3 in FcγR1 substantially reduced its function. In contrast to the FcγR3A and HzUCHT1 comprising fusions such as JIB1 and JIB15, we observed reduced potency for the HzUCHT1 Fab fusion with one FcγR3A fused to C-terminus of the constant light chain (JIB19). Given this result, we were surprised to observe an IgR identical to JIB19 but with a second FcγR3A fused to the C-terminal constant constant heavy chain, for a total of 2 FcγR3A per IgR molecule (JIB20), exhibited substantial activation at 1 and 0.1 nM Rituximab which was greater than JIB1, JIB15 or JIB19 and it was substantially greater than in the presence of the non-target specific Trastuzumab and without elevated levels of nonspecific activation from Trastuzumab relative to cells alone. These results indicate having 2 or more IgG binding domains can have enhanced potency over an IgR molecule with only one IgG binding domain.

### Example 19. Expression and Purification of Variant FcRs, IgG-Binding or and Fc-Binding Domains Fused to αCD3

[0512] IgG and Fc-binding heterologous polypeptides and heteromultimeric proteins can be expressed and purified as described in Example 1 and Example 11.

[0513] The wild type VH (SEQ ID NO: 134) and a mutated form of the VL to improve expression and stability (17F12QUAD-VL, SEQ ID NO: 283) of anti-IgG clone 17F12 were fused to a mutated form of the CH1 constant heavy chain comprising P126S and K213E (Kabat numbering) to ablate 17F12 self-binding (C4CH1-bDS, SEQ ID NO: 284) to form (C4CH1-bDS-17F12-his, SEQ ID NO: 285) and kappa light chain (kappabDS-17F12QUAD, SEQ ID NO: 286) and a humanized version of an αCD3 ScFv clone HzUCHT1 in the VL-VH orientation using a (G4S)₃ linker was fused to the C-terminus of the constant light chain to form (kappa-bDS-17F12QUAD-ScFv-HzUCHT1, SEQ ID NO: 287) generating the heterodimeric polypeptide, JIB33 (SEQ ID NO: 285 and 287) as depicted in FIG. 5C.

[0514] The wild type anti-Fc clone HP6017 is known to be capable of binding human IgG1, IgG2, IgG3, IgG4 and non-human primate IgG. HP6017-VH, SEQ ID NO: 288 was fused to a buried disulfide CH1 heavy chain (CH1-bDS, SEQ ID NO: 100) to form CH1-bDS-HP6017-his (SEQ ID NO: 289) and the wild type VL (HP6017-VL, SEQ ID NO: 290) was fused to a buried disulfide kappa light chain (kappabDS, SEQ ID NO: 101) to form kappabDS-HP6017 (SEQ ID NO: 291) and a humanized version of an αCD3 ScFv clone HzUCHT1 in the VL-VH orientation using a (G4S)₃ linker was fused to the C-terminus of the constant light chain to form (kappa-bDS-HP6017/ScFv-HzUCHT1, SEQ ID NO: 292) generating to heterodimeric polypeptide, JIB34 (SEQ ID NO: 289 and 292) as depicted in FIG. 5C.

[0515] An anti-Fc avimer, AVIG SEQ ID NO: 133 from Example 14 was fused to a his tag forming AVIG/ScFv-HzUCHT1-his fusion, JIB35 (SEQ ID NO: 293) as depicted in FIG. 2A.

[0516] The extracellular domain of the human CD32A Fc-receptor comprised point mutations R56H, K118N, T120V, L160Q and V172E, according to the residue number in SEQ ID NO: 9, (FcγR2A_mut, SEQ ID NO: 294) for increased Fc affinity and was fused via a (G4S)₃ linker to a humanized version of an αCD3 ScFv clone HzUCHT1 in the VL-VH orientation using a (G4S)₃ linker to form a FcγR2A_mut/ScFv-HzUCHT1-his fusion, JIB36 (SEQ ID 295) as depicted in FIG. 2A.

[0517] The extracellular domain of the human CD16A Fc-receptor comprised point mutations K122N, T124/Q176E, according to the residue number in SEQ ID NO: 1 (FcγR3A_mut1, SEQ ID NO: 296) for increased Fc affinity and was fused via a (G4S)₃ linker to a humanized version of an αCD3 ScFv clone HzUCHT1 in the VL-VH orientation using a (G4S)₃ linker to form a FcγR3A_mut1/ScFv-HzUCHT1-his fusion, JIB37 (SEQ ID 297) as depicted in FIG. 2A.

[0518] The extracellular domain of the human CD16A Fc-receptor comprised point mutations 190R, T118K, A119 and Y134F, according to the residue number in SEQ ID NO: 1 FcγR3A_mut2, SEQ ID NO: 298) for varied Fc affinity and was fused via a (G4S)₃ linker to a humanized version of an αCD3 ScFv clone HzUCHT1 in the VL-VH orientation using a (G4S)₃ linker to form a FcγR3A_mut2/ScFv-HzUCHT1-his fusion, JIB38 (SEQ ID 299) as depicted in FIG. 2A.

[0519] Domain 2 of the extracellular domain of the human CD64 Fc-receptor was fused with Domain 1 of the CD16A Fc-receptor to form FcγR1-D1-FcγR3A-D2, SEQ ID NO: 300) and was fused via a (G4S)₃ linker to a humanized version of an αCD3 ScFv clone HzUCHT1 in the VL-VH orientation using a (G4S)₃ linker to form a FcγR1-D1-FcγR3A-D2/ScFv-HzUCHT1-his fusion, JIB39 (SEQ ID 301) as depicted in FIG. 2A.

[0520] The VH/VL pair of HzUCHT1 was fused to the CH1 heavy chain and kappa light chain with the extracellular domain of Fc receptor FcγR3AV fused to the N-terminus of the variable heavy chain (FcγR3AV-S197P/HzUCHT1-CH1-bDS-his, SEQ ID NO: 302) and variable light chain FcγR3AV-S197P-HzUCHT-kappa-bDS SEQ ID NO: 303) via a (G4S)₃ linker and the chains SEQ ID 302 and 303 were co-expressed to produce JIB40 as shown in FIG. 5K.

[0521] FIG. 22A, FIG. 22B, FIG. 23 and Table 9 show the proteins were well expressed and were of high purity by SDS-PAGE and SEC with exception of JIB34 and JIB39 as shown in Table 2 below where their % Monomer by SEC was 51.8% and 21.1% respectively. Interestingly, the 17F12 variant, JIB33, comprising mutations in its CH1 constant domain to prevent self-binding and in its VL to improve expression did not exhibit laddering by SDS-PAGE in the reduced lane (FIG. 22A and FIG. 22B) in contrast to its wild type counterpart, JIB22. Additionally, JIB33 had substantially improved % Monomer by SEC relative to JIB22 with 86.8% vs. 13.3%, respectively. These results indicate the point mutations P126S and K213E in the constant CH1 domain ablated JIB33 self-binding and the 17F12 clone's binding epitope is in the CH1 domain. Despite a modest purity by SEC, the SDS-PAGE of the HP6017 protein JIB34 did not have laddering in the reduced lane (FIG. 22A and FIG. 22B) unlike that of the wild type 17F12 JIB22 indicating it does not self-bind when it only comprises CH1 and kappa constant regions and lacks an Fc region, consistent with it being a known human IgG1, IgG2, IgG3 and IgG4 Fc binder. The JIB39, FcγR1-D1-FcγR3A-D2/ScFv-HzUCHT1-his fusion had an SDS-PAGE profile indicative of disulfide scrambling by laddering in the non-reduced lane.

TABLE 9
Protein Expression and % Monomer by
SEC for IgR produced in Example 19.

| Protein | CHO (mg/L) | SEC % Monomer |
|---|---|---|
| JIB33 | 87 | 86.8% |
| JIB34 | 74 | 51.8% |
| JIB35 | 68 | 78.4% |
| JIB36 | 140 | 85.5% |
| JIB37 | 140 | 77.8% |
| JIB38 | 103 | 80.8% |
| JIB39 | 52 | 21.1% |
| JIB40 | 99 | 81.9% |

[0522] Next, IgRs at 0.1 and 1 nM were evaluated for their ability to bridge CD20+ Raji B cells with T cells and mediate T cell activation in the presence of 1 nM Rituximab, avoid T cell activation in the presence of 1 nM Trastuzumab or with Mosunetuzumab run as a positive control (FIG. 24) using the method described in Example 8. The 17F12 variant HzUCHT1 IgR, JI1B33, exhibited some T cell activation in the presence of 1 nM Rituximab relative to 1 nM Trastuzumab. The anti-Fc HP6017 HzUCHT1 IgR, JIB34, exhibited substantial T cell activation at both 1 nM and 0.1 nM IgR with Rituximab relative to Trastuzumab indicating use of a human pan-subclass (binds human IgG1, IgG2, IgG3 and IgG4) anti-Fc antibody in a Fab-like format fused to an immune cell surface protein binding antibody is a tractable architecture to bridge target-cell-bound antibodies to immune cell receptors and avoid immune cell activity from non-specific (unbound) antibodies. The AVIG HzUCHT1 fusion, JIB35, exhibited some T cell activation 1 nM and 0.1 nM Rituximab relative to Trastuzumab. When compared to the wild type FcγR3A-HzUCHT1 fusion, JIB1, the FcγR3A_mut1-HzUCHT1 JIB36 and FcγR2A_mut-HzUCHT1 JIB37 IgRs exhibited increased T cell activation potency at both 1 and 0.1 nM IgR with Rituximab without increasing signal from Trastuzumab alone indicating an Fc receptor comprising one or multiple mutations can be used can to enhance the potency of an IgR. In contrast, the FcγR3A_mut2-HzUCHT1 JIB37 IgR had a reduced level of T cell activation at both 1 nM and 0.1 nM with Rituximab. The HzUCHT1 Fab-like molecule with one FcγR3A fused to the N-terminus of its VH and one FcγR3A fused to its VL comprising a total of two FcγR3A per JIB40 IgR exhibited lower T cell activation than the single FcγR3A comprising FcγR3A-ScFv-HzUCHT1 JIB1 IgR at both concentrations in the presence of Rituximab.

### Example 20. Evaluation of IgRs' Ability to Bridge Cancer Cells to Immune Cells in the Presence of Tumor Specific IgG and High Concentrations of Nonspecific IgG

[0523] Rituximab is an anti-CD20 IgG1 that will specifically bind Raji cells but not T cells. Trastuzumab is an anti-HER2 IgG1 that will not specifically bind Raji cells or T cells. IgRs are capable of binding different immunoglobulins with the same IgR-binding epitopes with the same affinity in liquid phase when they are not bound to their targets regardless of their target specificity. Therefore, when not bound to their targets, Rituximab and Trastuzumab can compete for the same IgR immunoglobulin binding domains. JIB4, JI1B20, JIB34 and JIB37 IgRs at 100, 10 and 1 nM were evaluated for their ability to bridge CD20+ Raji B cells with T cells and mediate T cell activation, in the presence of 100, 10 and 1 nM Rituximab with or without 1 mg/mL Trastuzumab (anti-HER2, will not specifically bind Raji cells or T cells) to mimic the high concentrations of potentially IgR-competitive, non-target specific immunoglobulin present in vivo or with 1 mg/mL Trastuzumab without Rituximab to evaluate non-specific T cell activation due to IgRs in the presence of non-specific immunoglobulin at high concentration alone. Rituximab alone at 100, 10, and 1 nM, Trastuzumab alone at 1 mg/mL were run as negative controls and Mosunetuzumab alone as a positive control using the bioassay method described in Example 8.

[0524] FIG. 25 shows that the αFc-VHH/ScFv-HzUCHT1 JIB4 and anti-Fc H1P6017-HzUCHT1 JIB34 IgRs have the greatest potency with Rituximab in the absence of 1 mg/mL Trastuzumab by maintaining high signal at between the 10 nM and 1 nM IgR and Rituximab conditions however all of the IgRs have substantially greater signal at all of the IgR and Rituximab conditions relative to the IgR and Trastuzumab conditions. Surprisingly, despite the potential for competition between Rituximab and Trastuzumab for an IgR's IgG-binding domains, all of the IgRs were capable of mediating T cell activation in the presence of Rituximab and 1 mg/mL Trastuzumab that was substantially greater than the activation observed in presence of IgR with Trastuzumab alone indicating IgRs can take advantage of avidity due to the multivalent availability of immunoglobulins when they are bound to targets present on cells or present in immune complexes. Additionally, at the 100 nM condition, all of the IgRs were capable of mediating T cell activation in the presence of Rituximab and 1 mg/mL Trastuzumab that was not substantially less than in the presence of Rituximab alone. We were also surprised to observe at the 10 nM condition that JIB20, comprising two immunoglobulin binding domains per IgR molecule, was capable of mediating T cell activation in the presence of Rituximab and 1 mg/mL Trastuzumab that was not substantially less than in the presence of Rituximab alone and was greater that of one immunoglobulin binding domain comprising JIB4, JIB34 and JIB37 at the same conditions despite JIB20 having a lower potency than JIB4 and JIB34 and a similar potency to the high affinity JIB37 in the absence of 1 mg/mL Trastuzumab. These results indicate that IgRs are capable of mediating biologically functional synapse formation and immune cell activity by bridging target-bound immunoglobulins to immune cell surface proteins even in the presence of high concentrations of non-target specific immunoglobulins that are capable of binding the same immunoglobulin binding domain of an IgR, similar to the conditions in vivo. These results also indicate that having more than one IgG-binding domain per IgR molecule can enhance an IgRs potency and ability to bridge target-bound immunoglobulins to immune cell surface proteins in the presence of high concentrations of non-specific immunoglobulins that are capable of binding the same immunoglobulin binding domains of an IgR.

### Example 21. Expression, Purification and Evaluation of αCD3 IgRs with Multivalent Binding to IgG Via Multiple Anti-IgG, Anti-Fc or FcγR Domains

[0525] IgG and Fc-binding heterologous polypeptides and heteromultimeric proteins were expressed and purified as described in Example 1 and Example 11.

[0526] The VH of TR66 (SEQ ID 29) was fused to the buried disulfide CH1 heavy chain (SEQ ID 100) with the extracellular domain of Fc receptor FcγR3AV-S197P (SEQ ID NO: 23) fused to the C-terminus of the constant heavy chain via a (G4S)₃ and his tag (SEQ ID NO: 21) forming CH1bDS-TR66-FcγR3AV-S197P-his (SEQ ID NO: 304) and the VL of TR66 (SEQ ID NO: 30) was fused to the kappa light chain (kappabDS, SEQ ID NO: 101) with the extracellular domain of Fc receptor FcγR3AV-S197P (SEQ ID NO: 23) fused to the C-terminus of the constant light chain via a (G4S)₃ (kappabDS-HzUCHT1-FcγR3AV-S197P, SEQ ID NO: 305) and heavy chain as depicted in FIG. 5B to form JIB44 (SEQ ID NO: 304 and SEQ ID NO: 305). Alternatively, FcγR3AV-S197P was fused to the N-terminus of both the TR66 VH and VL (JIB46: SEQ ID NO: 306, SEQ ID NO: 307) for 2 Fc-binders per as shown in FIG. 5K and additionally to the C-terminus of the constant heavy chain (JIB45: SEQ ID NO: 308, SEQ ID NO: 307) for 3 Fc-binders per molecule as shown in FIG. 5L.

[0527] CH1bDS was fused to C233S-Fc-LALAPA-hole (SEQ ID NO: 40) excluding the redundant “EPKSSDKTHT” on SEQ 40 to form CH1bDS-Fc-LALAPA-hole (SEQ 309). FcγR3AV-S197P (SEQ 23) was fused to the N-terminus of SEQ 309 and kappabDS via (G4S)₃ linkers forming FcγR3AV-S197P-CH1bDS-Fc-LALAPA-hole (SEQ ID NO: 310) and FcγR3AV-S197P-kappabDS (SEQ ID NO: 311). The IgR comprising 2 FcγR per molecule, JIB47, was produced by expressing all 4 chains: SEQ 310, SEQ311, SEQ 44, SEQ 47 as shown in FIG. 4E.

[0528] The VH of HP6017 was fused to the N-terminus and the C-terminus of a spacer derived from the CH1 domain, SEQ ID NO: 312, forming HP6017-2xVH (SEQ 313). The VH of TR66 was fused to the C-terminus of HP6017-2xVH via the SEQ 311 linker and was attached to the N-terminus of CH1bDS forming HP6017-2xVH-TR66-VH-CH1bDS-his (SEQ ID NO: 314). The VL of HP6017 was fused to the N-terminus and the C-terminus of a spacer derived from the kappa domain, SEQ ID NO: 315, forming HP6017-2xVL (SEQ 316). The VL of TR66 was fused to the C-terminus of HP6017-2xVL via the SEQ 314 linker and was attached to the N-terminus of kappabDS forming HP6017-2xVL-TR66-VL-kappabDS (SEQ ID NO: 317). The IgR, JIB48, comprising two Fc-binding domains per molecule was produced by expressing both chains (SEQ ID NO: 314, SEQ ID NO: 317) as shown in FIG. 5M. Additionally, HP6017-2xVH was fused to the N-terminus of CH1bDS-his forming HP6017-2xVH-CH1bDS-his (SEQ ID NO: 318) and HP6017-2xVL was fused to the N-terminus of kappabDS with TR66-ScFv fused to the C-terminus via a (G4S)₃ linker forming HP6017-2xVL-kappabDS-TR66-ScFv (SEQ ID NO: 319). The IgR JIB49, which also comprises two Fc-binding domains per molecule, was produced by expressing SEQ 318 and SEQ ID NO: 319 as shown in FIG. 5I (without the half-life extension domain). Additionally, TR66-VH fused to CH1bDS and TR66-VL fused to kappabDS and both had (G4S)₃ linker on the C-terminus followed by 1P6017-ScFv in the VL-VH orientation with a (G4S)₃ linker between with a his tag on the C-terminus of the heavy chain forming SEQ ID NO: 320 and SEQ ID NO: 321 which were expressed to form JIB50 as shown in FIG. 5B.

[0529] Table 10, FIG. 26A, FIGS. 26B and 27 show that all of the IgRs were well expressed with high purity with exception of JIB48, JIB49 and JIB50 with 8.8%, 54.7% and 43.6% monomer by SEC. JIB44, which is similar to the high performing JIB20 Fab-like design with a total of two FcR per IgR but used a buried interchain disulfide strategy versus an interchain disulfide knockout strategy, shows similarly high purity with 84.7% monomer versus 84.9%, respectively, indicating high purity is achievable for this Fab-like architecture regardless of whether the buried disulfide or disulfide knockout strategy is used. The consistently low purity of HP6017 in different protein architectures and with different CD3 binding clones indicated VH and VL sequence optimization was warranted to try to improve its biophysical properties. Despite the moderate purity of JIB49 and JIB50, the ability to express a dual VH-VH and VL-VL Fab like structure with an ScFv off a constant domain (JIB49) or a Fab-like structure with an ScFv off the C-terminus of each constant domain, and both with a buried interchain disulfide strategy, indicates these are tractable architectures for IgRs. The high purity of JIB47 with two Fc-binding FcγR domains and full length Fc indicates the LALAPA mutations are sufficient to knockout self-binding and aggregation, consistent with the results for JIB6. Additionally, the use of a CH1 and constant kappa chain pair with a buried interchain disulfide strategy in combination with a second CH1 and constant lambda chain pair with a natural interchain disulfide strategy did not to affect the purity of the IgR molecule implying proper heavy chain and light chain pairing.

TABLE 10
Protein Expression and % Monomer by
SEC for IgR produced in Example 21.

| Protein | CHO (mg/L) | SEC % Monomer |
|---|---|---|
| JIB44 | 90 | 84.7% |
| JIB45 | 152 | 89.5% |
| JIB46 | 180 | 92.0% |
| JIB47 | 167 | 87.2% |
| JIB48 | 8 | 8.8% |
| JIB49 | 11 | 54.7% |
| JIB50 | 23 | 43.6% |

[0530] Next, the IgRs were evaluated at 10 nM and 1 nM for their ability to bridge CD20+ Raji B cells with T cells and mediate T cell activation, in the presence of 10 nM Rituximab with or without 1 mg/mL Trastuzumab or with 1 mg/mL Trastuzumab without Rituximab. Rituximab alone at 10 nM, Trastuzumab alone at 1 mg/mL and cells alone were run as negative controls and Mosunetuzumab alone as a positive control using the bioassay method described in Example 8 and Example 20. FIG. 28 shows that all of the IgRs were capable of mediating T cell activation in the presence of Rituximab alone that was substantially greater than IgRs in the presence of 1 mg/mL Trastuzumab alone. Additionally, JIB20, J1B44, JIB47 and JIB49 were capable of mediating T cell activation in the presence of Rituximab and 1 mg/mL Trastuzumab that was substantially greater than in the presence of 1 mg/mL Trastuzumab alone and was not substantially less than in the presence of Rituximab alone for the 10 nM condition. In the presence of Rituximab, with or without 1 mg/mL Trastuzumab, TR66 Fab with FcR off both the C-terminus of its light chain and heavy chain (JIB44) was more potent than a similar design using HzUCHT1 (JIB20) at 0.1 nM IgR and more potent than TR66 with FcR on the N-terminus of both the light chain and heavy chain (JIB46) and additionally off the C-terminus of the heavy chain (JIB45) at both 1 and 0.1 nM IgR. While this result indicates selection of the immune cell surface receptor binding clone can affect the potency of an IgR, it also shows the IgR Fab-like architecture with an immunoglobulin binding domain off the C-terminus of both the heavy and light chain consistently shows high potency even in the presence of competitive non-specific immunoglobulin. It also shows that having FcR off the C-terminus of the heavy and light chain of the Fab-like IgR can be superior over the N-termini of the VH and VL regions even when a third Fc-binder per molecule is fused to the C-terminus. The dual Fc-binding Fc fusion with SP34 (JIB47) and dual HP6017-VH-VH/VL-VL Fab with TR66-ScFv (JIB49) both exhibited potent T cell activation in the presence of Rituximab with or without 1 mg/mL Trastuzumab indicating that two Fc-binding FcγR or two Fc-binding antibody domains are both tractable compositions to produce target cell specific activation of immune cells while overcoming potential competition from high concentration of non-specific IgG. Additionally, JIB47 comprised one light chain/heavy chain pair using CH1bDS and kappabDS and a second light chain/heavy chain pair comprising the WT CH1 and lambda sequences indicating that having a differential in interchain disulfide status between two constant light chain and heavy chain pairs is a tractable means to enable intended constant light chain and heavy chain pairing to maintain specific and intended target binding for a multispecific protein.

### Example 22. Expression, Purification and Evaluation of αCD3 and αCD28 IgRs with Multivalent Binding to IgG Via Multiple Anti-IgG, Anti-Fc or FcγR Domains

[0531] IgG and Fc-binding heterologous polypeptides and heteromultimeric proteins were expressed and purified as described in Example 1 and Example 11.

[0532] TR66 Fab with the buried disulfide had two different anti-Fc VHHs (anti-Fc VHH2: SEQ ID NO: 322; anti-Fc VHH3, SEQ ID NO: 323), the extracellular domain of mouse FcγR3 and FcγR2b (SEC ID 324, SEQ ID NO: 325) fused to the C-terminus of it's heavy chain with C-terminal his tag and light chain and co-expressed to form JIB51 (SEQ ID NO: 326, SEQ ID NO: 327), JIB52 (SEQ ID NO: 328, SEQ ID NO: 329), JIB53 (SEQ ID NO: 330, SEQ ID NO: 331), JIB54 (SEQ ID NO: 332, SEQ ID NO: 333) as depicted in FIG. 5B. Additionally, anti-Fc VHH2 was fused with VHH2 or VHH3 was fused with VHH3 and both were fused with TR66 ScFv form JIB55 (SEQ ID NO: 334) and JIB56 (SEQ ID NO: 335) as depicted in FIG. 2C.

[0533] To improve the biophysical properties of HP6017, such as increasing % Monomer by SEC after single step purification, three different humanization strategies were performed. HzHP6017A (VH SEQ ID NO: 336, VL SEQ ID NO: 337) was designed by grafting the CDRs according to Kabat (Kabat, 1992) of HP6017 onto the top hit human germlines (IGHV1-46*01 and IGKV1-33*01) in the IMGT database (https://www.imgt.org/3Dstructure-DB/cgi/DomainGapAlign.cgi) and back-mutated to the mouse HP6017 wild type sequence in locations critical to IgG packing (Chothia et al., 1985), with known risk factors (Studnicka et al., 1994)(Foote & Winter, 1992). HzHP6017B (VH SEQ ID NO: 338, VL SEQ ID NO: 339) was designed by grafting the CDRs according to Kabat into the IGHV1-2*02 and IGKV1-12*01 human germlines in the IMGT database with VH framework mutations R93 S and D97E and VL framework mutation V11L according to IMGT numbering. HzHP6017C (VH SEQ ID NO: 340, VL SEQ ID NO: 341) was designed by using the BioPhi method previously described (Prihoda et al., 2022). Table 11 displays the % identity to the top hit human germline gene and allele in the IMGT database and highlights that the humanization method for HzHP6017B-VH/VL sequences produced the highest % identity to human germline sequences. The humanized VH and VL pairs were then fused to the CH1bDS and kappabDS sequences with HzUCHT1 ScFv off the C-terminus of the light chain via a (G4S)3 linker like JIB34 generating JIB57 (SEQ ID NO: 342, SEQ ID NO: 343), JIB58 (SEQ ID NO: 344, SEQ ID NO: 345) and JIB59 (SEQ ID NO: 346, SEQ ID NO: 347) as shown in FIG. 5C.

TABLE 11
% Identity of top hit human germline
sequences from IMGT database.

| Variable Chain | IMGT gene and allele | % Identity |
|---|---|---|
| HP6017 VH | IGHV1-46*01 | 69.4% |
| HP6017 VL | IGKV1-33*01 | 67.4% |
| HzHP6017A VH | IGHV1-46*01 | 75.5% |
| HzHP6017A VL | IGKV1-33*01 | 72.6% |
| HzHP6017B VH | IGHV1-46*01 | 88.8% |
| HzHP6017B VL | IGKV1-39*01 | 84.2% |
| HzHP6017C VH | IGHV1-46*01 | 79.6% |
| HzHP6017C VL | IGKV1-39*01 | 81.1% |

[0534] A humanized version of VHH-CH128, HzVHH-CH128 (SEQ ID NO: 348), was designed by grafting the CDRs according to Kabat into the IGHV3-64*04 human germline sequence with mutations S24A, V42F, K48Q, Y52A and S54A according to IMGT numbering. VHH-CH128 was fused to another VHH-CH128 via a (G4S)3 linker and then fused to HzUCHT1-ScFv generating JIB60, VHH-CH128-VHH-CH128-HzUCHT1-ScFv-his (SEQ ID NO: 349), as depicted in FIG. 2C.

[0535] Two tandem extracellular domains of mouse FcγRIV were fused to HzUCHT1-ScFv (G4S)₃ linkers generating JIB61, mFcγRIV-mFcγRIV-HzUCHT1-ScFv-his (SEQ ID NO: 350), as depicted in FIG. 2C. αFc-10-VHH was fused to the N-terminus HzUCHT1-ScFv via a (G4S)₃ linker followed by the anti-HSA-VHH1 (SEQ ID NO: 351) or αMSA-VHH forming JIB62, αFc-10-VHH-HzUCHT1-ScFv-anti-HSA-VHH1 (SEQ ID NO: 352), and JIB63, αFc-10-VHH-HzUCHT1-ScFv-αMSA-VHH (SEQ ID NO: 353), as depicted in FIG. 3A.

[0536] To explore a different architecture and anti-CD3 clone with the anti-IgG 17F12 clone, TR66 Fab using C4CH1-bDS and kappabDS was fused with 17F12QUAD-ScFv off the C-terminus of the light chain and heavy chain via (G4S)3 linkers generating JIB64 (SEQ ID NO: 354, SEQ ID NO: 355) as depicted in FIG. 5B.

[0537] Anti-CD28 IgR proteins were designed by fusing the extracellular domain of human FcγR2A (SEQ ID NO: 9) to the C-terminus of CH1bDS and kappabDS forming CH1bDS-FcγR2A-his (SEQ ID NO: 356) and kappabDS-FcγR2A (SEQ ID NO: 357) comprising the VH and VL pairs of 2E12 (SEQ ID NO: 205, SEQ ID NO: 207), TGN1412 (SEQ ID NO: 210, SEQ ID NO: 212), 9.3 (SEQ ID NO: 215, SEQ ID NO: 217), 8GA8 (8GA8-VH SEQ ID NO: 358, 8GA8-VL SEQ ID NO: 359) 9D7 (9D7-VH SEQ ID NO: 360, 9D7-VL SEQ ID NO: 361) and TN228 (TN228-VH SEQ ID NO: 362, TN228-VL SEQ ID NO: 363) generating JIB67 (SEQ ID NO: 364, SEQ ID NO: 365), JIB68 (SEQ ID NO: 366, SEQ ID NO: 367), JIB69 (SEQ ID NO: 368, SEQ ID NO: 369), JIB70 (SEQ ID NO: 370, SEQ ID NO: 371), JIB71 (SEQ ID NO: 372, SEQ ID NO: 373) and JIB72 (SEQ ID NO: 374, SEQ ID NO: 375) respectively, as depicted in FIG. 5B.

[0538] Table 12, FIG. 29A, FIG. 29B, and FIG. 30 show that all of the IgRs were well expressed with high purity after single step purification with the exception of JIB57, JIB59, JIB64 and JIB70 with 46.9%, 57.5%, 43.4% and 14.7% monomer by SEC, respectively. In contrast to the wild type HP6017-VH/VL for JIB34, humanized HP6017A-VH/VL for JIB57 and humanized HP6017C-VH/VL for JIB59, the HP6017B-VH/VL humanization strategy for JIB58 produced an IgR of the highest purity amongst the four with 79.4% monomer by SEC versus 51.8% for JIB34, 46.9% for JIB57, 57.5% for JIB59 indicating the HP6017B humanization strategy had the additional benefit of improving the biophysical properties of the IgR. JIB51, JIB52, JIB53 and JIB54 IgRs with Fab-like structures and two immunoglobulin domains, one off of both the heavy and light chain, show that fused VHH domains do not mispair with the VL of the Fab and that the use of mouse Fc receptors does also not have issues with expression or purity. Similarly, JIB55, JIB56, JIB60 and JIB61 with two tandem anti-immunoglobulin binding domains including anti-Fc and anti-CH1 VHHs or mouse Fc receptors fused in a head to tail orientation along with a C-terminal anti-CD3 domain did not have issues with expression or purity. The anti-CD28 JIB67, JIB68, JIB69, JIB70, JIB71 and JIB72 all have the same Fab-like structure similar to that of anti-CD3 JIB20, JIB44, JIB51, JIB52, JIB53 and JIB52 but with two FcγR2A fused to the heavy chain and light chain versus immunoglobulin binding VHHs, FcγR3A or mouse FcγR. The high expression and purity of all of these constructs (with exception of JIB70) indicates this particular IgR architecture can be produced at generally high expression and purity from single step purification if the starting components are amenable. In the case of JIB70, the low purity and expression is caused by the VH/VL pair used in the Fab-like scaffold and not the immunoglobulin binding domains incorporated.

TABLE 12
Protein Expression and % Monomer by
SEC for IgR produced in Example 22.

| Protein | CHO (mg/L) | SEC % Monomer |
|---|---|---|
| JIB51 | 293 | 98.0% |
| JIB52 | 224 | 95.0% |
| JIB53 | 88 | 97.1% |
| JIB54 | 127 | 99.4% |
| JIB55 | 125 | 77.0% |
| JIB56 | 94 | 92.0% |
| JIB57 | 150 | 46.9% |
| JIB58 | 225 | 79.4% |
| JIB59 | 215 | 57.5% |
| JIB60 | 358 | 96.6% |
| JIB61 | 130 | 83.3% |
| JIB62 | 119 | 99.0% |
| JIB63 | 307 | 98.6% |
| JIB64 | 35 | 43.4% |
| JIB67 | 67 | 99.4% |
| JIB68 | 132 | 98.9% |
| JIB69 | 176 | 98.7% |
| JIB70 | 8 | 14.7% |
| JIB71 | 84 | 96.6% |
| JIB72 | 217 | 95.4% |

[0539] Next, the anti-CD3 IgRs JIB34, JIB57, JIB58, JIB59, JIB64, JIB4, JIB62, JIB63, JI1B44, JIB53, JIB54 and JIB61 were evaluated at 1 nM and 0.1 nM for their ability to bridge CD20+ Raji B cells with Jurkat T cells and mediate T cell activation, in the presence of 1 nM Rituximab to evaluate target cell specific activation or with 1 nM Trastuzumab to evaluate nonspecific activation. Rituximab alone at 1 nM, Trastuzumab alone at 1 nM and cells alone were run as negative controls and Mosunetuzumab alone as a positive control using the bioassay method described in Example 8. FIG. 31 shows that the humanized anti-Fc HP6017 IgRs (JIB57, JI1B58, JIB59) have comparable T cell activation to the mouse wild type HP6017 IgR at both 1 and 0.1 nM Rituximab and the activation substantially greater than the IgRs in the presence of Trastuzumab indicating the humanization methods minimally reduced the potency of the antibodies and did not increase non-specific activation. Moreover, in addition to JIB58 having the highest % identity to its top hit human germline sequence and the highest % monomer by SEC, it also had the highest potency of the three humanized HP6017 IgRs evaluated. JIB64, the TR66 Fab comprising two IgG binders per molecule with 17F12QUAD ScFv off both the light chain and heavy chain had comparable potency at both 1 and 0.1 nM Rituximab to the WT and humanized HP6017 IgRs (JIB20, JIB57, JIB58 and JIB59) which is in contrast with the JIB33 17F12QUAD Fab-like IgR which gave little T cell activation over background in Example 19. This indicates the C4CH1 P126S and K213E mutations, which ablated self-binding, and 17F12QUAD VL mutations, to improve expression and stability, enabled high purity for a 17F12 Fab while maintaining target binding for the 17F12-VH and 17F12QUAD-VL pair and that a Fab-like structure should be pursued with an alternative immune cell surface protein binding clone. JIB62 and JIB63 which are similar to JIB4 with anti-Fc-10-VHH fused to HzUCHT1 but with anti-HSA or anti-MSA fused to the C-terminus both had comparable potency with 1 nM Rituximab and only a small reduction in T cell activation at 0.1 nM Rituximab without increasing the activation in the presence of Trastuzumab indicating the presence of the serum albumin binders on the C-terminus of the IgR is minimally interfering with mediating IgG and immune cell target binding and function and does not increase nonspecific immune cell activity. In FIG. 32, comparing TR66 Fabs with two FcγR per IgR comprising human FcγR3A (JIB44), mFcγR3 (JIB53) or mFcγR2b (JIB54) shows that an IgRs with human FcγR3A has the highest potency at both 1 and 0.1 nM Rituximab and the IgR potency between the three is consistent with known monovalent affinity (K_{D}) rankings for human IgG1 where FcγR3A (68 nM)>mFcγR2b (1100 nM)>mFcγR3 (9300 nM)(Dekkers et al., 2017; Patel et al., 2019). This data indicates that IgRs can function even when comprising low affinity IgG binders in the approximately 10 M monovalent K_{D} range. The IgR JIB61 with two mFcγRIV in tandem with HzUCHT1-ScFv had a potency between that of JIB53 and JIB54.

[0540] The anti-CD3 IgRs JIB51, JIB52, JIB55, JIB56, JIB60, JIB65 and JIB50 were evaluated at 10 nM and 1 nM for their ability to bridge CD20+ Raji B cells with Jurkat T cells and mediate T cell activation, in the presence of 10 nM Rituximab with or without 1 mg/mL Trastuzumab or with 1 mg/mL Trastuzumab without Rituximab. Rituximab alone at 10 nM, Trastuzumab alone at 1 mg/mL and cells alone were run as negative controls and Mosunetuzumab alone as a positive control using the bioassay method described in Example 8 and Example 20. In FIG. 33, comparing TR66 Fab-like designs with two anti-Fc VHHs per IgR (JIB51, JIB52) off the C-terminus of the heavy and light chains with the same two anti-Fc VHHs in a head-to-tail arrangement in tandem with TR66-ScFv (JIB55, JIB56) shows that both formats mediate T cell activation in the presence of 10 or 1 nM Rituximab that is substantially greater than with 1 mg/mL Trastuzumab. Interestingly, the TR66 Fab-like format appears to produce less non-specific activation than the tandem designs in the presence of 1 mg/mL Trastuzumab alone and a greater ratio in signal between IgR in the presence of Rituximab and 1 mg/mL Trastuzumab versus IgR with Trastuzumab alone. JIB60, the anti-CH1 IgR with two VHH in tandem with HzUCHT1 appears to have lower potency than the tandem anti-Fc IgRs JIB55 and JIB56 at 1 nM Rituximab. The JIB50 TR66 Fab comprising two anti-Fc HP6017-ScFv per IgR with one off the HC and one off LC shows comparable T cell activation to JIB51, JIB52 at 1 nM Rituximab in the absence or presence of 1 mg/mL.

[0541] The anti-CD3 IgRs JIB51, JIB52 and JIB53 were evaluated at 1 nM for their ability to bind mouse IgG and mediate T cell activation in combination with 1 nM anti-CD3 OKT3 mIgG2a (Biolegend, 317325) relative to IgR alone at 1 nM and OKT3 alone at 1 nM. Rituximab (Rtx) alone at 1 nM was used as a negative control. Test articles were co-cultured with CD20+ Raji B cells and Jurkat-NFAT-Luc T cells and read out for luminescence using the procedures from Example 8. FIG. 34 shows that JIB51 and JIB53 mediate substantially greater activation in the presence of OKT3 relative to OKT3 alone and JIB51 does not have substantially greater activation when used alone relative to Rituximab alone or cells alone. JIB52 does not have substantially greater activation in the OKT3 relative to OKT3 alone. These results indicate JIB51 cross-reacts with mouse IgG and more so than the mouse FcγR3 comprising JIB53 IgR.

[0542] The anti-CD28 IgRs JIB67, JIB68, JIB69, JIB71 and JIB72 were evaluated using a modified version of the co-culture assay described in Example 8 where 96 well U-bottom plates were coated with 100 μl of 1 μg/mL anti-CD3 OKT3 (Biointron, B6928, Mouse IgG2a(D134G)CH1+Human IgG1 CH2+CH3-Mouse kappa) overnight at 4° C. and washed with PBS once the next day prior to the cell co-culture assay to remove any unbound OKT3 from the wells. IgRs were evaluated at 10 nM and 1 nM for their ability to bridge CD20+ Raji B cells with Jurkat T cells and mediate T cell co-stimulation (OKT3 IgG on the plate is providing signal 1), in the presence of 10 nM Rituximab to evaluate target cell specific T cell co-stimulation activity or with 10 nM Trastuzumab to evaluate nonspecific T cell co-stimulation activity. Rituximab alone at 10 nM, Trastuzumab alone at 10 nM and cells alone were run as negative controls and anti-CD28 mIgG1 clone CD28.2 (Thermo, 16-0289-85) alone at 10 nM and 1 nM was used as a positive T cell co-stimulation control. FIG. 35 shows that all of the anti-CD28 IgRs when combined with Rituximab had similar and in some cases greater potency than the anti-CD28 CD28.2 IgG. All of the IgRs had substantially greater T cell co-stimulation activity in combination with Rituximab relative to their activity in combination with the non-target cell specific Trastuzumab. JIB67, JIB69 and JIB72 exhibited activity in combination with Trastuzumab that was not substantially greater than the activity of Trastuzumab alone, indicating these IgRs have minimal non-specific T cell co-stimulation activity. In contrast, JIB68 and JIB71 exhibited some non-specific T cell co-stimulation activity when comparing them combined with Trastuzumab versus Trastuzumab alone.

### Example 23. Expression, Purification and Evaluation of αCD3 and αTCRα/β IgRs with Multivalent Binding to IgG Via Multiple Anti-IgG, Anti-Fc or FcγR Domains

[0543] IgG and Fc-binding heterologous polypeptides and heteromultimeric proteins were expressed and purified as described in Example 1 and Example 11.

[0544] SP34 Fab using CH1NoDS and hLC7NoDS was fused with FcγR2A on the C-terminus of both the constant heavy chain and light chain via (G4S)₃ linkers followed by the αHSA-VHH with a C-terminal his tag on the heavy chain to form JIB73 (SEQ ID NO: 376, SEQ ID NO: 377) as depicted in FIG. 5J. Similarly, HzUCHT1 using CH1bDS and kappabDS was fused with FcγR2A on the C-terminus of both the constant heavy chain and light chain via (G4S)₃ linkers followed by the αHSA-VHH with a C-terminal his tag on the heavy chain to form HzUCHT1-based JIB74 (SEQ ID NO: 378, SEQ ID NO: 379) as depicted in FIG. 5J. TR66, HzTR66, Hu291, huCLB-T3/4.A, HuYTH 12.5, BC3, Hz06 and αTCR BMA-031 Fab using CH1bDS and kappabDS (or hLC7bDS for HuYTH 12.5 and Hz06) was fused with FcγR2A on the C-terminus of both the constant heavy chain and light chain via (G4S)₃ linkers followed by a C-terminal his tag on the heavy chain to form TR66-based JIB75 (SEQ ID NO: 380, SEQ ID NO: 381), HzTR66-based JIB76 (SEQ ID NO: 382, SEQ ID NO: 383), Hu291-based JIB77 (SEQ ID NO: 384, SEQ ID NO: 385), huCLB-T3/4.A-based JIB78 (SEQ ID NO: 386, SEQ ID NO: 387), HuYTH 12.5-based JIB79 (SEQ ID NO: 388, SEQ ID NO: 389), BC3-based JIB80 (SEQ ID NO: 390, SEQ ID NO: 391), Hz06-based JIB81 (SEQ ID NO: 392, SEQ ID NO: 393), BMA-031-based JIB82 (SEQ ID NO: 394, SEQ ID NO: 395) as depicted in FIG. 5B. HzTR66 was generated using a method similar to that of HzHP6017B where HzTR66 VH SEQ ID NO: 396 and VL SEQ ID NO: 397 were designed by grafting the CDRs according to Kabat into the IGHV1-2*02 and IGKV1-12*01 human germlines in the IMGT database with VH framework mutations R93S and D97E and VL framework mutation V11L according to IMGT numbering.

[0545] FcγR2A was fused to the N-terminus of CH1bDS-Fc-LALAPA-hole and kappabDS via (G4S)₃ linkers forming FcγR2A-CH1bDS-Fc-LALAPA-hole (SEQ 398) and FcγR2A-kappabDS (SEQ 399). SP34-Fc-LALAPA-knob was mutated with C233S and SP34 VL was fused with hLC7NoDS to knock out the inter-chain disulfide forming SP34-NoDS-Fc-LALAPA-knob (SEQ ID NO: 400) and SP34-hLC7NoDS (SEQ ID NO: 401). HzUCHT1-VH was swapped with SP34 in SP34-Fc-LALAPA-knob to form HzUCHT1-Fc-LALAPA-knob (SEQ ID NO: 402). HzUCHT1 VL was fused with kappaNoDS for form HzUCHT1-kappaNoDS (SEQ ID NO: 403). SP34-based JIB85 and HzUCHT1-based JIB84 was produced by coexpressing FcγR2A-CH1bDS-Fc-LALAPA-hole and FcγR2A-kappabDS together with SP34-NoDS-Fc-LALAPA-knob and SP34-hLC7NoDS or HzUCHT1-Fc-LALAPA-knob and HzUCHT1-kappaNoDS as depicted in FIG. 4E. JIB86 was produced by co-expressing SP34-NoDS-Fc-LALAPA-knob and SP34-hLC7NoDS-FcγR2A (SEQ ID NO: 377) with FcγR2A fused to the N-terminus of C233S/Fc-LALAPA-hole via a (G4S)₃ linker generating FcγR2A-C233S/Fc-LALAPA-hole (SEQ ID NO: 404) as depicted in FIG. 4G. JIB87 and JIB88 was generated by fusing a second FcγR2A onto the N-terminus of FcγR2A-C233S/Fc-LALAPA-hole via a (G4S)₃ linker forming (SEQ ID NO: 405) and co-expressing with C233S/Fc-LALAPA-knob (SEQ ID NO: 406) fused to either HzUCHT1-ScFv (SEQ ID NO: 407) or SP34-ScFv (SEQ ID NO: 408) via (G4S)₃ linkers as depicted in FIG. 4C but with an additional IgBD on the N-terminus of the first IgBD.

[0546] JIB89 was generated by fusing FcγR2A followed by SP34-ScFv, FcγR2A and αHSA-VHH via (G4S)₃ linkers forming FcγR2A-SP34-ScFv-FcγR2A-αHSA-VHH (SEQ ID NO: 409) as depicted in FIG. 3B (in a rearranged order). Similarly, JIB90 was generated but using HzUCHT1-ScFv forming FcγR2A-HzUCHT1-ScFv-FcγR2A-αHSA-VHH (SEQ ID NO: 410). JIB91 and JIB92 are IgRs comprising two Fc-binding domains per molecule and have heavy chains HzHP6017B-2xVH-CH1bDS-αHSA-VHH (SEQ ID NO: 411) and light chains HzHP6017B-2xVL-kappabDS-HzUCHT1-ScFv (SEQ ID NO: 412) or HzHP6017B-2xVL-kappabDS-SP34-ScFv (SEQ ID NO: 413), respectively as depicted in FIG. 5I. JIB93 is an IgR comprising two Fc-binding domains per molecule with a heterodimeric Fc, as depicted in FIG. 4I, and was generated using 4 chains, the first light chain comprised HzHP6017B-2xVL-kappabDS (SEQ ID NO: 414), the first heavy chain comprised HzHP6017B-2xVH-CH1bDS-Fc_mut-LALAPA-hole (SEQ ID NO: 415) with additional Fc mutations N276K, L309V (EU Numbering) to ablate HzHP6017B self Fc-binding, the second light chain comprised SP34-hLC7NoDS (SEQ ID NO: 401) and the second heavy chain comprised SP34-VL-CH1NoDS-Fc_mut-LALAPA-knob (SEQ ID NO: 416) with additional Fc mutations N276K, L309V to ablate HzHP6017B self Fc-binding. JIB94 is an IgR comprising two Fc-binding domains per molecule with a heavy chain comprising SP34-VH-CH1NoDS-HzHP6017B-ScFv-his (SEQ ID NO: 417) and a light chain comprising SP34-VL-hLC7NoDS-HzHP6017B-ScFv (SEQ ID NO: 418) as depicted in FIG. 5B.

[0547] JIB95 is an IgR comprising two anti-IgG binding domains per molecule with a heavy chain Hz17F12-2xVH-C4CH1bDS-αHSA-VHH-his (SEQ ID NO: 419) where the CH1 comprises the P126S and K213E mutations used in JIB33 to ablate Hz17F12 self-binding and the VH-VH spacer comprises the P126S mutation (C4CH1spacer, SEQ ID NO: 557) and a light chain Hz17F12-2xVL-kappabDS-SP34-ScFv (SEQ ID NO: 420) as depicted in FIG. 5I (without the half-life extension domain). Hz17F12 was generated using a method similar to that of HzHP6017B where Hz17F12 VH SEQ ID NO: 421 and VL SEQ ID NO: 422 were designed by grafting the CDRs according to Kabat into the IGHV1-2*02 and IGKV4-1*01 human germlines in the IMGT database with VH framework mutations R93S and D97E and VL framework mutation K24R according to IMGT numbering. JIB96 is an IgR comprising two IgG-binding domains per molecule with a heterodimeric Fc, as depicted in FIG. 4I, and was generated using 4 chains, the first light chain comprised Hz17F12-2xVL-kappabDS (SEQ ID NO: 423), the first heavy chain comprised Hz17F12-2xVH-C4CH1bDS-Fc-LALAPA-hole (SEQ ID NO: 424) with P126S and K213E mutations in the CH1 and P126S in the C4CH1spacer to ablate Hz17F12 self-binding, the second light chain comprised SP34-hLC7NoDS (SEQ ID NO: 401) and the second heavy chain comprised SP34-VL-C4CH1NoDS-Fc-LALAPA-knob (SEQ ID NO: 425) with P126S and K213E mutations in the CH1 to ablate Hz17F12 self-binding. JIB97 is similar to JIB95 using the heavy chain Hz17F12-2xVH-C4CH1bDS-αHSA-VHH-his but with TR66 off the LC in Hz17F12-2xVL-kappabDS-TR66-ScFv (SEQ ID NO: 426) as depicted in FIG. 5I (without the half-life extension domain).

[0548] Table 13, FIG. 36A, FIG. 36B, FIG. 36C, FIG. 37A, and FIG. 37B show that all of the IgRs were well expressed with high or moderate purity after single step purification with the exception of JIB91 and JIB92 which did not have detectable protein expression and JIB93 with 44.7% monomer by SEC. All three of these constructs comprised the dual HzHP6017B VH-VH/VL-VL design with constant domain spacers between. In contrast, JIB49 comprised the same dual HP6017 VH-VH/VL-VL design using the same spacers as JIB91 and JIB92 but was capable of expression indicating the humanized sequence has structural differences relative to the wild type mouse sequence contributing to the loss of expression for the dual variable chain format. While JIB93 comprised the dual HzHP6017B VH-VH/VL-VL design, the molecular weights of the chains on the reduced SDS-PAGE gel indicates the HzHP6017B heavy and light chain were not recovered as the molecular weights were more consistent with the SP34 heavy and light chains. The SP34 heavy chain comprising Fc mutations N276K, L309V to ablate HzHP6017B self-binding was recovered indicating these mutations did not interfere with expression and protein recovery by Protein A affinity chromatography. Additionally, the Hz17F12 dual VH-VH/VL-VL constructs, with the same VL-VL spacers and similar VH-VH spacers as JIB91 and JIB92 did not have issues with expression whether with an Fc (JIB96) or without an Fc (JIB95, JIB97) indicating the loss of expression for dual HzHP6017B VH-VH/VL-VL designs are specific to the HzHP6017B clone.

[0549] It is notable from SEC and SDS-PAGE that JIB84 and IB85, which comprised four unique polypeptide chains including heterodimer Fc regions, were well expressed and of high purity with 84.2% and 84.6% monomer, respectively. Importantly, JIB84 comprised a first light chain/heavy chain pair using CH1bDS/kappabDS buried interchain disulfide and a second light chain/heavy chain pair comprising CH1NoDS/kappaNoDS without an interchain disulfide; and JIB85 comprised a first light chain/heavy chain pair using CH1bDS/kappabDS and a second light chain/heavy chain pair comprising CH1NoDS/lambdaNoDS without an interchain disulfide. The high purity results indicate the use of a differential interchain disulfide strategy between two light chain/heavy chain pairs in a single molecule enables the ability to produce high purity multimeric proteins where the constant light chain and heavy chains pair with their intended partners reinforcing the findings for JIB47 in Example 21 which used a CH1bDS/kappabDS buried sulfide and CH1-WT/lambda-WT natural disulfide strategy. This also indicates that a differential interchain disulfide strategy enables the use of constant light chain/heavy chain pairs that have the same light chain type (such as CH1/kappa and CH1/kappa or CH1/lambda and CH1/lambda) or different light chain types (such as CH1/kappa and CH1/lambda). The purity data also shows that the three chain, two chain and single chain IgR designs of JIB86; JIB87 and JIB88; and JIB89 and JIB90 are all tractable strategies to enable two immunoglobulin binding domains, one immune cell surface protein binding domain and half life extension within a single IgR molecule.

TABLE 13
Protein Expression and % Monomer by
SEC for IgR produced in Example 23.

| Protein | CHO (mg/L) | SEC % Monomer |
|---|---|---|
| JIB73 | 182 | 94.9% |
| JIB74 | 132 | 92.8% |
| JIB75 | 106 | 97.5% |
| JIB76 | 122 | 97.7% |
| JIB77 | 76 | 97.4% |
| JIB78 | 35 | 99.2% |
| JIB79 | 95 | 96.7% |
| JIB80 | 84 | 96.8% |
| JIB81 | 47 | 100.0% |
| JIB82 | 76 | 97.0% |
| JIB84 | 56 | 84.2% |
| JIB85 | 46 | 84.6% |
| JIB86 | 114 | 94.0% |
| JIB87 | 81 | 89.4% |
| JIB88 | 116 | 91.8% |
| JIB89 | 87 | 93.8% |
| JIB90 | 48 | 84.4% |
| JIB91 | Not Detected | Not Applicable |
| JIB92 | Not Detected | Not Applicable |
| JIB93 | 23 | 44.70% |
| JIB94 | 2 | 66.1% |
| JIB95 | 11 | 84.9% |
| JIB96 | 11 | 69.5% |
| JIB97 | 3 | 62.7% |

[0550] The anti-CD3 IgRs JIB73, JIB74, JIB84, JIB85, JIB87, JIB88, JIB89 and JIB90 were evaluated at 10 nM and 1 nM for their ability to bridge CD20+ Raji B cells with Jurkat T cells and mediate T cell activation, in the presence of 10 nM Rituximab with or without 1 mg/mL Trastuzumab or with 1 mg/mL Trastuzumab without Rituximab using the bioassay method described in Example 8 and Example 20. FIG. 38 compares SP34 versus HzUCHT1 clones in the same four unique IgR constructs. All of the IgRs show potent T cell activation in the presence of 10 nM and 1 nM Rituximab that is substantially greater than in the presence of Trastuzumab. Across all four designs, IgRs using SP34 (JIB73, JIB85, JIB88, JIB89) had a substantially greater activity in the presence of Rituximab and 1 mg/mL Trastuzumab than in the presence of 1 mg/mL Trastuzumab alone, did not have substantially less activity in the presence of Rituximab and 1 mg/mL Trastuzumab than in the presence of Rituximab alone. The relative activities for the four IgRs using HzUCHT1 (JIB74, JIB84, JIB87, JIB90) in the presence of Rituximab and 1 mg/mL Trastuzumab versus with 1 mg/mL Trastuzumab alone or Rituximab alone were less pronounced than with SP34. This data shows that fusing an anti-HSA domain to the Fab-like structure in JIB73 and JIB74 does not interfere with function. The positive data for JIB84 and JIB85 shows using a differential interchain disulfide strategy between two light chain and heavy chain pairs can create functional pairs of pairs maintaining specific target binding for multispecific proteins with high potency, high expression and high purity for either CH1/kappa and CH1/kappa pairs or CH1/kappa and CH1/lambda pairs. It is also noteworthy that the single chain designs (JIB89 and JIB90), with a D1-D2-D3-D4 strategy where D1 and D3 are immunoglobulin binding domains, D2 is an immune cell surface protein binding domain and D4 is a serum albumin binding domain, all show potent activity in the presence of Rituximab alone and the SP34 design has a high ratio of activity between IgR combined with Rituximab and 1 mg/mL Trastuzumab relative to IgR combined with 1 mg/mL Trastuzumab alone, in this case a raw signal RLU ratio of approximately 3.

[0551] The anti-CD3 IgRs JIB75, JIB76, JIB77, JIB78, JIB79, JIB80, JIB81 and anti-TCR IgR JIB82 all used the Fab-like structure in FIG. 5B with two FcγR2A fused to the C-terminus of the constant light chain and heavy chains. were evaluated at 10 nM and 1 nM for their ability to bridge CD20+ Raji B cells with Jurkat T cells and mediate T cell activation, in the presence of 10 nM Rituximab with or without 1 mg/mL Trastuzumab or with 1 mg/mL Trastuzumab without Rituximab using the bioassay method described in Example 8 and Example 20. FIG. 39 shows that all of the IgRs, with the exception of HzTR66-based JIB76, exhibited a substantially greater activity in the presence of Rituximab or Rituximab and 1 mg/mL Trastuzumab than in the presence of 1 mg/mL Trastuzumab alone. The anti-CD3 IgRs JIB78, JIB79, JIB80, JIB81 and the anti-TCR IgR all exhibited T cell activity in the presence of Rituximab and 1 mg/mL Trastuzumab that was not substantially less than in the presence of Rituximab alone indicating IgRs can function across multiple TCR complex epitopes including different CD3 co-receptors and TCR chains.

[0552] The anti-CD3 IgRs JIB86, JIB93, JIB94, JIB95, JIB96, JIB97 all used the Fab-like structure in FIG. 5B with two FcγR2A fused to the C-terminus of the constant light chain and heavy chains. were evaluated at 10 nM and 1 nM for their ability to bridge CD20+ Raji B cells with Jurkat T cells and mediate T cell activation, in the presence of 10 nM Rituximab with or without 1 mg/mL Trastuzumab or with 1 mg/mL Trastuzumab without Rituximab using the bioassay method described in Example 8 and Example 20. FIG. 40 shows that, with exception of JIB93, all of the IgRs evaluated exhibited substantially greater T cell activation in the presence of Rituximab than in the presence of Trastuzumab alone. The lack of specificity between Rituximab and Trastuzumab for JIB93 is consistent with the purity results where the HP6017B VH-VH/VL-VL strategy appears to eliminate HP6017B heavy and light chain expression while still expressing SP34 light and heavy chain by SDS-PAGE and likely leaving them unpaired to their HP6017B counterparts lending to high nonspecific binding and activation in the T cell activation assay. The T cell activity for JIB86 in the presence of Rituximab and 1 mg/mL Trastuzumab was substantially greater than with 1 mg/mL Trastuzumab alone and not substantially less than with Rituximab alone. While the JIB94 SP34-Fab-like IgR with two HzHP6017B-ScFv (one off each constant chain) and the 17F12-based JIB95, JIB96 and JIB96 did not exhibit a high ratio of T cell activation in the presence of Rituximab and 1 mg/mL Trastuzumab relative to Trastuzumab alone it is important to note that four chain, JIB96, comprising dual Hz17F12 VH-VH/VL-VL using the C4CH1spacer and kappaspacer along with a buried disulfide and the self-binding C4CH1 knockout mutations successfully pair with the SP34 heavy and light chain pair using the C4CH1 knockout mutations and lacking a natural disulfide providing further evidence that a differential interchain disulfide strategy is a tractable means to ensure intended light chain and heavy chain pairing to retain target binding and function.

### Example 24. Expression, Purification and Evaluation of αCD3, αCD28, αCD137 and αCD89 IgRs with Multivalent Binding to IgG Via Multiple Anti-Fc or FcγR Domains

[0553] IgG and Fc-binding heterologous polypeptides and heteromultimeric proteins were expressed and purified as described in Example 1 and Example 11.

[0554] Anti-CD28 IgRs were generated by VH and VL pairs fused to CH1bDS and kappabDS with human FcγR2A fused to the C-terminus of both the heavy chain (with a his tag) and light chain via (G4S)3 linkers to form Hz2E12-based JIB100 (SEQ ID NO: 427, SEQ ID NO: 428), Hz9.3-based JIB101 (SEQ ID NO: 429, SEQ ID NO: 430), Hz8GA8-based JIB102 (SEQ ID NO: 431, SEQ ID NO: 432), Hz9D7-based JIB103 (SEQ ID NO: 433, SEQ ID NO: 434), HzTN228-based JIB104 (SEQ ID NO: 435, SEQ ID NO: 436), Hz28.3-based JIB105 (SEQ ID NO: 437, SEQ ID NO: 438), Hz5.11A1-based JIB106 (SEQ ID NO: 439, SEQ ID NO: 440), Hz5.11A1-C55S-based JIB107 (SEQ ID NO: 441, SEQ ID NO: 440) and TY24876-based JIB108 (SEQ ID NO: 442, SEQ ID NO: 443) as depicted in FIG. 5B. Hz2E12 VH SEQ ID NO: 444 and VL SEQ ID NO: 445 as well as Hz9.3 VH SEQ ID NO: 446 and VL SEQ ID NO: 447 were designed by grafting the CDRs according to Kabat into the IGHV4-59*01 and IGKV4-1*01 human germlines in the IMGT database with VL framework mutation K24R according to IMGT numbering. Hz8GA8 VH SEQ ID NO: 448 and VL SEQ ID NO: 449 were designed by grafting the CDRs according to Kabat into the IGHV1-2*02 and IGKV1-12*01 human germlines in the IMGT database with VH framework mutations R93S and D97E and VL framework mutation V11L according to IMGT numbering. Hz9D7 VH SEQ ID NO: 450 and VL SEQ ID NO: 451 as well as HzTN228 VH SEQ ID NO: 452 and VL SEQ ID NO: 453 were designed by grafting the CDRs according to Kabat into the IGHV4-59*01 and IGKV1-12*01 human germlines in the IMGT database with VL framework mutation V11L according to IMGT numbering. Hz28.3 VH SEQ ID NO: 454 and VL SEQ ID NO: 455 were designed by grafting the CDRs according to Kabat into the IGHV1-2*02 and IGKV1-12*01 human germlines in the IMGT database with VH framework mutations R93S and D97E and VL framework mutation V11L according to IMGT numbering. 5.11A1 WT VH SEQ ID NO: 456 and VL SEQ ID NO: 457 were humanized to Hz5.11A1 VH SEQ ID NO: 458 and VL SEQ ID NO: 459 by grafting the CDRs according to Kabat into the IGHV1-2*02 and IGKV1-12*01 human germlines in the IMGT database with VH framework mutations R93S and D97E and VL framework mutation V11L according to IMGT numbering. Hz5.11A1-C55S VH SEQ ID NO: 460 was generated by framework mutation C55S in SEQ ID NO: 458 according to IMGT numbering. Additionally, JIB109 (SEQ ID NO: 461) was generated by fusing human FcγR2A to the N-terminus of 1h-79-807-sdAb-VL (SEQ ID NO: 462) followed by a second FcγR2A and his tag via (G4S)3 linkers as depicted in FIG. 2C in a rearranged order.

[0555] Anti-CD3 IgR JIB110 was generated by SP34-VH-CH1NoDS-HzFc-10-VHH-his (SEQ ID NO: 463) and SP34-VL-hLC7NoDS-HzFc-10-VHH (SEQ ID NO: 464) as depicted in FIG. 5B. Similarly, JIB111 was generated by SP34-VH-CH1NoDS-anti-Fc-HzVHH2-his (SEQ ID NO: 465) and SP34-VL-hLC7NoDS-anti-Fc-HzVHH2 (SEQ ID NO: 466) as depicted in FIG. 5B. JIB112 was generated by using 20G6 VH (SEQ ID NO: 467) and VL (SEQ ID NO: 468) to make heavy chain 20G6-VH-CH1bDS-FcγR2A-his (SEQ ID NO: 469) and light chain 20G6-VL-kappabDS-FcγR2A (SEQ ID NO: 470) as depicted in FIG. 5B. JIB113 (SEQ ID NO: 471), JIB114 (SEQ ID NO: 472) and JIB115 (SEQ ID NO: 473) were generated by fusing human FcγR2A to the N-terminus of SP34-sdAb-VH (SEQ ID NO: 474), 20G6-sdAb-VH (SEQ ID NO: 475) and Hz06-sdAb-VH (SEQ ID NO: 476), respectively, followed by a second FcγR2A and his tag via (G4S)3 linkers as depicted in FIG. 2C in a rearranged order. HzFc-10-VHH (SEQ ID NO: 477), anti-Fc-HzVHH2 (SEQ ID NO: 478), SP34-sdAb-VH, 20G6-sdAb-VH and Hz06-sdAb-VH and Hz6017-sdAb-VH (SEQ ID NO: 479) were generated by grafting the heavy chain CDRs according to Kabat into the IGHV3-64*04 human germline sequence with framework mutations S24A, V42F, K48Q, Y52A and S54A according to IMGT numbering. JIB126 was generated by SP34-VH-CH1NoDS-HzHP6017-sdAb-VH-his (SEQ ID NO: 480) and SP34-VL-hLC7NoDS-HzHP6017-sdAb-VH (SEQ ID NO: 481) as depicted in FIG. 5B. JIB127 is an IgR comprising two Fc-binding domains per molecule with a heterodimeric Fc and an immune cell binding ScFv fused onto one light chain, as depicted in FIG. 4J, and was generated using 4 chains, the first light chain comprised HzHP6017B-VL-kappabDS (SEQ ID NO: 482), the first heavy chain comprised HzHP6017B-VH-CH1bD-Fc_mut-LALAPA-hole (SEQ ID NO: 483) with additional Fc mutations N276K, L309V to ablate HzHP6017B self Fc-binding, the second light chain comprised HzHP6017B-VL-kappaNoDS-SP34-ScFv (SEQ ID NO: 484) and the second heavy chain comprised HzHP6017B-VH-CH1bD-Fc_mut-LALAPA-knob (SEQ ID NO: 485) with additional Fc mutations N276K, L309V to ablate HzHP6017B self Fc-binding. To address the expression issues with the dual HzHP6017 VH-VH/VL-VL designs in Example 23, three different spacer strategies were evaluated between the VH-VH and VL-VL pairs. JIB128, JIB129 and JIB130 are identical to JIB92 as depicted in FIG. 5I except: for JIB128, the HzHP6017B VL-VL spacer derived from the constant kappa domain was replaced with a shorter spacer derived from the constant kappa light chain (SEQ ID NO: 486) forming HzHP6017-2xVLshort-kappabDS-SP34-ScFv (SEQ ID NO: 487) and co-expressed with JIB92 HC (SEQ ID NO: 411); for JIB129, the HzHP6017B VH-VH spacer derived from the constant CH1 domain was replaced with a shorter spacer derived from the constant CH1 chain (SEQ ID NO: 488) forming HzHP6017B-2xVHshort-CH1bDS-αHSA-VHH-his (SEQ ID NO: 489) and co-expressed with JIB92 LC (SEQ ID NO: 413); for JIB130 the HzHP6017B VH-VH and VL-VL spacers derived from IgG constant domains were replaced by (G4S)₃ spacers forming HzHP6017-2xVLG4S3-kappabDS-SP34-ScFv (SEQ ID NO: 490) and HzHP6017B-2xVHG4S3-CH1bDS-αHSA-VHH-his (SEQ ID NO: 491).

[0556] Anti-CD137 IgRs were generating by VH and VL pairs fused to CH1bDS and kappabDS or lambdabDS (for P566) with human FcγR2A fused to the C-terminus of both the heavy chain (with a his tag) and light chain via (G4S)3 linkers to form 5B9-based JIB116 (SEQ ID NO: 492, SEQ ID NO: 493), Hz5B9-based JIB117 (SEQ ID NO: 494, SEQ ID NO: 495), Urelumab-based JIB118 (SEQ ID NO: 496, SEQ ID NO: 497), P566-based JIB119 (SEQ ID NO: 498, SEQ ID NO: 499), Hz4B4-1-based JIB120 (SEQ ID NO: 500, SEQ ID NO: 501), Hz4B4-2-based JIB121 (SEQ ID NO: 502, SEQ ID NO: 503) as depicted in FIG. 5B. Hz4B4-1 is a variant of Hz4B4-2 with seven-fold weaker affinity (Hz4B4-1-VH SEQ ID NO: 504, Hz4B4-1-VL SEQ ID NO: 505). Hz5B9 VH SEQ ID NO: 506 and VL SEQ ID NO: 507 were designed by grafting the CDRs according to Kabat into the IGHV4-59*01 and IGKV2-28*01 human germlines in the IMGT database.

[0557] Anti-CD89 IgRs were generated by VH and VL pairs fused to CH1bDS and kappabDS with human FcγR2A fused to the C-terminus of both the heavy chain (with a his tag) and light chain via (G4S)3 linkers to form 14A8-based JIB122 (SEQ ID NO: 508, SEQ ID NO: 509), 8D2-based JIB123 (SEQ ID NO: 510, SEQ ID NO: 511), A77-based JIB124 (SEQ ID NO: 512, SEQ ID NO: 513) and HzA77-based JIB125 (SEQ ID NO: 514, SEQ ID NO: 515) as depicted in FIG. 5B. HzA77 VH (SEQ ID NO: 516) and VL (SEQ ID NO: 517) were designed by grafting the CDRs according to Kabat into the IGHV1-2*02 and IGKV2-28*01 human germlines in the IMGT database with VH framework mutations R93S and D97E according to IMGT numbering.

[0558] Table 14, FIG. 41A, FIG. 41B, FIG. 41C, FIG. 42A, and FIG. 42B show that all of the IgRs were well expressed with high purity after single step purification with the exception of JIB113, JIB126, JIB127 and JIB128. JIB113 was an attempt at converting the SP34 VH/VL pair antibody into a variable heavy chain only single domain (sdAb-VH). While protein was recovered and relatively pure by SDS-PAGE, the % monomer was quite low by SEC with only 12.3% indicating non-specific interactions with the matrix or itself. Similarly, JIB126, which used the HzHP6017B VH/VL pair converted into a sdAb-VH and fused to each constant chain of an SP34 Fab did not express indicating the conversion into an sdAb-VH was unsuccessful. In contrast, the conversion of the Hz06 and 20G6 VH/VL pairs into sdAb-VH constructs was successful from an expression and purity standpoint. The JIB102 IgR using humanized Hz8GA8 VH/VL sequences was 98.8% monomer which is in stark contrast with the wildtype 8GA8 VH/VL construct JIB70 from Example 22 where the % monomer was 14.7%. This indicates the humanization strategy for Hz8GA8 had the additional benefit of improving its biophysical characteristics.

[0559] JIB127 evaluated a Fc-Fc heterodimer with the HzHP6017B VH/VL pair on each Fc arm and an SP34 ScFv off of one of the HzHP6017B light chains using a differential interchain disulfide pairing strategy however no protein was recovered after single purification despite the SDS-PAGE gel of the supernatant (FIG. 41C) showing some protein was expressed in the 25 kDa and 50 kDa region in the reduced lane. These results in congruence with previous results indicate the N276K and L309V mutations may only partially reduce HP6017 or HzHP6017B self-binding to an Fc region. JIB128, JIB129 and JIB130 evaluated alternative spacers between the HzHP6017B dual VH-VH/VL-VL design to address the challenges previously observed with expression for HzHP6017B VH-VH/VL-VL design JIB91, JIB92 and JIB93 which all used CH1spacer/kappaspacer. The alternative spacer strategies included CH1spacer/shortkappaspacer (JIB128), shortCH1spacer/kappaspacer (JIB129) and (G4S)₃/(G4S)₃. The SEC results in Table 14 show that having a short kappa spacer between the variable light chains did not resolve expression issues while having a short CH1 spacer or flexible (G4S)₃ spacers between both variable domain pairs resolved the expression and purity challenges for the dual VH-VH/VL-VL design when using the HzHP6017B clone.

TABLE 14
Protein Expression and % Monomer by
SEC for IgR produced in Example 24.

| Protein | CHO (mg/L) | SEC % Monomer |
|---|---|---|
| JIB100 | 41 | 100.0% |
| JIB101 | 52 | 95.9% |
| JIB102 | 160 | 98.8% |
| JIB103 | 113 | 94.6% |
| JIB104 | 86 | 98.0% |
| JIB105 | 27 | 99.0% |
| JIB106 | 57 | 96.8% |
| JIB107 | 118 | 98.5% |
| JIB108 | 37 | 100.0% |
| JIB109 | 25 | 87.4% |
| JIB110 | 123 | 95.4% |
| JIB111 | 61 | 92.1% |
| JIB112 | 33 | 97.6% |
| JIB113 | 6 | 12.3% |
| JIB114 | 53 | 91.8% |
| JIB115 | 197 | 92.9% |
| JIB116 | 32 | 98.9% |
| JIB117 | 45 | 96.2% |
| JIB118V1 | 59 | 90.3% |
| JIB119 | 133 | 99.8% |
| JIB120 | 40 | 98.7% |
| JIB121 | 29 | 97.7% |
| JIB122 | 39 | 99.6% |
| JIB123 | 111 | 100.0% |
| JIB124 | 55 | 100.0% |
| JIB125 | 37 | 78.5% |
| JIB126 | Not Detected | Not Applicable |
| JIB127 | Low Detection | Not Applicable |
| JIB128 | 0.3 | Not Applicable |
| JIB129 | 43 | 90.0% |
| JIB130 | 13 | 78.5% |

[0560] The anti-CD3 IgRs JIB110, JIB111, JIB112, JIB114, JIB115, JIB129, JIB130 and JIB49 were evaluated at 10 nM and 1 nM for their ability to bridge CD20+ Raji B cells with Jurkat T cells and mediate T cell activation, in the presence of 10 nM Rituximab with or without 1 mg/mL Trastuzumab or with 1 mg/mL Trastuzumab without Rituximab using the bioassay method described in Example 8 and Example 20. The results in FIG. 43, show that JIB110, JIB111, JIB112, JIB129, JIB130 and JIB49 show substantially greater T cell activation at one or both concentrations of Rituximab than with 1 mg/mL Trastuzumab. JIB110 and JIB111 both showed T cell activation in the presence of Rituximab at 10 nM and 1 mg/mL Trastuzumab that was not substantially less than 10 nM Rituximab alone. These results indicate the humanization of Fc-10-VHH anti-Fc-HzVHH2 was successful. In contrast, while the JIB112, 20G6-based Fab-like IgR with 2 two FcγR2A off of each LC and HC C-terminus was functional, the 20G6 and Hz06 FcγR2A-sdAb-VH-FcγR2A (JIB114, JIB115, respectively) fusions did not retain their function from the VH/VL pair conversion into single domain VH only constructs. The HzHP6017B dual VH-VH/VL-VL Fab-like IgRs with FcγR2A off of each LC and HC C-terminus were both potent T cell activators in the presence of Rituximab alone and similar to that of the WT HzHP6017 dual VH-VH/VL-VL IgR JIB49 indicating the shortCH1spacer/kappaspacer spacer between the VH-VH/VL-VL pair (JIB129) or the G4S₃ spacer between both the VL-VL and VH-VH pairs (JIB130) not only enabled expression and high purity for the HzHP6017 clone but also retained potent function.

[0561] The anti-CD28 IgRs JIB68, JIB100, JIB101, JIB102, JIB03, JIB04, JIB105, JIB106, JIB107, JIB108 and JIB109 were evaluated at 10 nM and 1 nM for their ability to bridge CD20+ Raji B cells with Jurkat T cells and mediate T cell co-stimulation in the presence of 10 nM Rituximab, to evaluate target cell specific T cell co-stimulation activity, or with 10 nM Trastuzumab, to evaluate nonspecific T cell co-stimulation activity, using the method described in Example 22. Rituximab alone at 10 nM, Trastuzumab alone at 10 nM and cells alone were run as negative controls and anti-CD28 mIgG1 clone CD28.2 alone at 10 nM and 1 nM was used as a positive T cell co-stimulation activity control. The results in FIG. 44 show that all of the IgRs evaluated were capable of mediating T cell co-stimulation, in the presence of 10 nM Rituximab at either 10 nM IgR, 1 nM IgR or both, that is greater or substantially greater than the co-stimulation in the presence of 10 nM Trastuzumab. Many of the IgRs evaluated, including JIB100 (Hz2E12), JIB101 (Hz9.3), JIB103 (Hz9D7) and JIB104 (HzTN228), were the humanized versions of the anti-CD28 IgRs evaluated in Example 22 (JIB67, JIB69, JIB71, JI1B72, respectively) indicating these humanized IgRs maintained their co-stimulation function. JIB102 (Hz8GA8) was not evaluated in Example 22 as the WT clone (JIB70) due to poor purity though it exhibited some function as a humanized clone with high purity at the 1 nM IgR condition. JIB105 (Hz28.3), JIB108 (TY24876) and JIB109 (1h-79-807), which were not evaluated in Example 22, were capable of mediating co-stimulation as a humanized or wild type IgRs. JIB109 is a three domain single peptide chain format with FcγR2A fused to the C-terminus and N-terminus of an anti-CD28 single domain VL antibody (sdAb-VL) indicating this is a tractable IgR structure for enabling functional cell-cell synapses and signaling. JIB106 (Hz5.11A1) and JIB107 (Hz5.11A1-C55S) were humanized versions of the WT clone 5.11A1 that TGN1412 was originally developed from and the humanization and the mutation of a cysteine at position 55 to serine (according to IMGT numbering) reduced the amount of nonspecific co-stimulation signal in the presence of 10 nM Trastuzumab relative to the alternatively humanized 5.11A1 clone TGN1412.

[0562] The anti-CD137 IgRs JIB116, JIB117, JIB118V1, JIB119, JIB120 and JIB121 were evaluated at 10 nM and 1 nM for their ability to bridge CD20+ Raji B cells with HEK-Luc-CD137 cells (Biointron), as a surrogate reporter cell for T cells and NK cells, to assess their ability to mediate co-stimulation activity, in the presence of 10 nM Rituximab. Rituximab alone at 10 nM and a titration of Urelumab (Biointron, B315002), a Human IgG4-S228P antibody capable of binding FcγR2B on Raji cells to mediate CD137 crosslinking, alone as a positive control using the bioassay method described in Example 8 and Example 20 but with HEK-Luc-CD137 in place of Jurkat T cells. The results in FIG. 45 show that all of the IgRs, in the presence of 10 nM Rituximab, were capable of mediating co-stimulation activity via targeting and crosslinking CD137 that was substantially greater than in the presence of 10 nM Rituximab alone. These results indicate IgRs are capable of mediating CD137⁺ immune cell co-stimulation function in the presence of antibodies bound to target cells. The positive control of Urelumab titrated at multiple concentrations provided a signal consistent with the assay's ability to detect CD137 crosslinking and co-stimulation activity.

[0563] The anti-CD89 IgRs JIB122, JIB123, JIB124 and JIB125 were evaluated for their ability to bridge Jurkat-NFAT-Luc T cells, as a target cell where positive signal indicates crosslinking and is a surrogate reporter for cytotoxicity, and CHO-K1-CD89⁺ cells (Biointron), as a surrogate effector cell representative of CD89⁺ Myeloid cells. IgRs were evaluated at 100 nM, 10 nM and 1 nM for their ability to mediate functional crosslinking activity in the presence of 1 nM OKT3 (Biointron, B6928) with or without 1 mg/mL Trastuzumab, or with 1 mg/mL Trastuzumab without OKT3. Trastuzumab alone at 1 mg/mL and cells alone were run as negative controls and a dose titration of OKT3 (Biointron, B6928) alone or at 1 nM OKT3 with Trastuzumab at 1 mg/mLs were run as positive controls and to set the background signal. The bioassay method described in Example 8 and Example 20 was used but with Jurkat T cells in place of Raji B cells (target cells) and CHO-K1-CD89+ in place of Jurkat T cells (effector cells). The results in FIG. 46 show that all of the IgRs, with exception of JIB125, were capable of mediating CD89 cross-linking and surrogate effector function activity by target cell luciferase production in the presence of 1 nM OKT3 that was substantially greater than in the presence of 1 nM OKT3 alone or 1 mg/mL Trastuzumab alone. Additionally, 14A8 and 8D2-based IgRs were both capable of mediating CD89 cross-linking and surrogate effector function in the presence of 1 nM OKT3 and 1 mg/mL Trastuzumab that was substantially greater than in the presence of 1 mg/mL Trastuzumab alone or 1 mM OKT3 and Trastuzumab alone. These results indicate IgRs are capable of mediating CD89⁺ Myeloid cell effector function against target cells opsonized with antibodies and in the additional presence of high concentrations of nonspecific IgG, similar to conditions in vivo.

### Example 25. Expression, Purification and Evaluation of Mouse Reactive αCD3, αCD28, αCD137 and αCD40 IgRs with Multivalent Binding to IgG Via Multiple Anti-Fc or FcγR Domains

[0564] IgG and Fc-binding heterologous polypeptides and heteromultimeric proteins were expressed and purified as described in Example 1 and Example 11. To enable in vivo studies in an immunocompetent syngeneic mouse tumor model known to generate endogenous anti-tumor antibodies, such as CT26 colorectal tumors, 4T1 triple-negative breast tumors, RENCA renal cortical tumors (Zappala et al., 2022), IgRs were generated with domains capable of binding mouse polypeptides on the surface of mouse immune cells and domains capable of binding natural endogenous mouse IgG in vivo including the major subclasses mIgG1, mIgG2a and mIgG2b which make up 90% of the mIgG present in serum/blood in vivo. These IgRs should be capable of bridging endogenous anti-tumor antibodies bound to cancer cells to immune cell receptors to drive cellular activity and efficacy by limiting tumor growth relative to a vehicle control. Additionally, IgRs should synergize when combined with exogenously introduced mAbs against tumor cell targets to enable enhanced anti-tumor efficacy.

[0565] IgRs were generating by VH and VL pairs fused to mCH1bDS (SEQ ID NO: 518) and mkappabDS (SEQ ID NO: 519) with mouse mFcγR2b (capable of binding mIgG1, mIgG2a and mIgG2b) or anti-Fc-VHH2 (cross-reacts with mIgG1, mIgG2a and mIgG2b) fused to the C-terminus of both the heavy chain and light chain with αMSA-VHH fused to the C-terminus of the mCH1bDS domain followed by a his tag to form: anti-mCD3 KT3/mFcγR2b-based JIB137 (SEQ ID NO: 520, SEQ ID NO: 521), KT3/anti-Fc-VHH2-based JIB138 (SEQ ID NO: 522, SEQ ID NO: 523) and 2C11/mFcγR2b-based JIB139 (SEQ ID NO: 524, SEQ ID NO: 525); anti-mCD28 TY24876/mFcγR2b-based JIB140 (SEQ ID NO: 526, SEQ ID NO: 527), anti-mCD137 Lob12.3/mFcγR2b-based JIB142 (SEQ ID NO: 528, SEQ ID NO: 529), Lob12.3/anti-Fc-VHH2-based JIB143 (SEQ ID NO: 530, SEQ ID NO: 531), 3H3/mFcγR2b-based JIB144 (SEQ ID NO: 532, SEQ ID NO: 533); anti-mCD40 1C10/mFcγR2b-based JIB145 (SEQ ID NO: 534, SEQ ID NO: 535), 1C10/anti-Fc-VHH2-based JIB146 (SEQ ID NO: 536, SEQ ID NO: 537) and FGK45/mFcγR2b-based JIB147 (SEQ ID NO: 538, SEQ ID NO: 539) as depicted in FIG. 5J. JIB141 was generated by fusing mFcγR2b to the N-terminus of 1h-79-807-sdAb-VL followed by mFcγR2b, αMSA-VHH and a his tag via (G4S)3 linkers forming mFcγR2b-SP1h-79-807-sdAb-VL-mFcγR2b-αMSA-VHH-his (SEQ ID NO: 540) as depicted in FIG. 3B (in a rearranged order).

[0566] To have exogenously introduced IgG to combine with IgRs in vivo to treat solid tumors, an anti-EphA2 monoclonal antibody capable of binding mouse tumors such as CT26 was produced by fusing anti-EphA2 VH (SEQ ID NO: 549) and VL (SEQ ID NO: 550) to mouse mIgG1 heavy chain (SEQ ID NO: 551) and mouse lambdal light chain (SEQ ID NO: 552) generating JIB148. Similarly, to have exogenously introduced IgG to combine with IgRs in vivo to treat liquid tumors, an anti-CD19 monoclonal antibody, capable of binding mouse blood tumors such as A20 B cell lymphoma tumors and with preferential binding towards FcγRIV and human FcγR3A/B, was produced by fusing 1D3 VH (SEQ ID NO: 553) and VL (SEQ ID NO: 554) to mouse mIgG2a heavy chain (SEQ ID NO: 555) and mouse kappa light chain (SEQ ID NO: 556) and cultured in the presence of 20 M kifunensine to produce non-fucosylated Fc glycoforms, that have preferential binding towards FcγRIV and human FcγR3A/B, generating anti-mCD19 mAb 1D3-IgG2a-kif.

TABLE 15
Protein Expression and % Monomer by SEC for
mouse reactive IgR produced in Example 25.

| Protein | CHO (mg/L) | SEC % Monomer |
|---|---|---|
| JIB137 | 116 | 82.85% |
| JIB138 | 275 | 96.14% |
| JIB139 | 133 | 82.8% |
| JIB140 | 3 | 83.4% |
| JIB141 | 82 | 4.3% |
| JIB142 | 220 | 91.6% |
| JIB143 | 321 | 93.2% |
| JIB144 | 48 | 82.6% |
| JIB145 | 252 | 91.6% |
| JIB146 | 337 | 93.7% |
| JIB147 | 87 | 70.9% |
| JIB148 | 378 | 89.3% |
| 1D3-IgG2a-kif | 47 | 98.6% |

[0567] Table 15, FIG. 47, FIG. 48A, and FIG. 48B show that all of the IgRs and IgG were well expressed with high purity after single step purification with exception of JIB141 with a mFcγR2b-SP1h-79-807-sdAb-VL-mFcγR2b-αMSA-VHH-his design having 4.3% monomer by SEC. This is in contrast to the similar JIB109 design, which uses the same anti-CD28 clone, with FcγRA-SP1h-79-807-sdAb-VL-FcγR2A-his having 87.4% monomer after single step purification by SEC.

[0568] The present invention is not intended to be limited in scope to the particular disclosed embodiments, which are provided, for example, to illustrate various aspects of the invention. Various modifications to the compositions and methods described will become apparent from the description and teachings herein. Such variations may be practiced without departing from the true scope and spirit of the disclosure and are intended to fall within the scope of the present disclosure.

### REFERENCES

[0569] Anthony, R. M., Wermeling, F., Karlsson, M. C. I., & Ravetch, J. V. (2008). Identification of a receptor required for the anti-inflammatory activity of IVIG. Proceedings of the National Academy of Sciences of the United States of America, 105(50), 19571-19578.
[0570] Arnold, J. N., Dwek, R. A., Rudd, P. M., & Sim, R. B. (2006). Mannan binding lectin and its interaction with immunoglobulins in health and in disease. Immunology Letters, 106(2), 103-110.
[0571] Beck, A., Goetsch, L., Dumontet, C., & Corvaia, N. (2017). Strategies and challenges for the next generation of antibody-drug conjugates. Nature Reviews. Drug Discovery, 16(5), 315-337.
[0572] Belin, P., Dassa, J., Drevet, P., Lajeunesse, E., Savatier, A., Boulain, J.-C., & Ménez, A. (2004). Toxicity-based selection of Escherichia coli mutants for functional recombinant protein production: application to an antibody fragment. Protein Engineering, Design & Selection: PEDS, 17(5), 491-500.
[0573] Boesch, A. W., Alter, G., & Ackerman, M. E. (2015). Prospects for engineering HIV-specific antibodies for enhanced effector function and half-life. Current Opinion in HIV and AIDS, 10(3), 160-169.
[0574] Boesch, A. W., Brown, E. P., Cheng, H. D., Ofori, M. O., Normandin, E., Nigrovic, P. A., Alter, G., & Ackerman, M. E. (2014). Highly parallel characterization of IgG Fc binding interactions. mAbs, 6(4), 915-927.
[0575] Bonvin, P., Venet, S., Kosco-Vilbois, M., & Fischer, N. (2015). Purpose-Oriented Antibody Libraries Incorporating Tailored CDR3 Sequences. Antibodies, 4(2), 103-122.
[0576] Brinkmann, U., & Kontermann, R. E. (2017). The making of bispecific antibodies. mAbs, 9(2), 182. Brinkmann, U., Reiter, Y., Jung, S. H., Lee, B., & Pastan, I. (1993). A recombinant immunotoxin containing a disulfide-stabilized Fv fragment. Proceedings of the National Academy of Sciences of the United States of America, 90(16), 7538-7542.
[0577] Carrier, A., Ducancel, F., Settiawan, N. B., Cattolico, L., Maillbre, B., Ldonetti, M., Drevet, P., Ménez, A., & Boulain, J. C. (1995). Recombinant antibody-alkaline phosphatase conjugates for diagnosis of human IgGs: application to anti-HBsAg detection. Journal of Immunological Methods, 181(2). https://doi.org/10.1016/0022-1759(94)00344-v
[0578] Chang, T.-W., Hung, A. F.-H., & Lu, D. C.-S. (2017). Anti-human mIgA antibodies capable of lysing mIgA-B lymphocytes and decreasing IgA production (U.S. Pat. No. 9,688,776). In US patent (U.S. Pat. No. 9,688,776). https://patentimages.storage.googleapis.com/b9/7c/fO/df399842c072a7/US9688776.pdf
[0579] Chen, K., & Cerutti, A. (2011). The function and regulation of immunoglobulin D. Current Opinion in Immunology, 23(3), 345-352.
[0580] Chothia, C., Novotnf, J., Bruccoleri, R., & Karplus, M. (1985). Domain association in immunoglobulin molecules. The packing of variable domains. Journal of Molecular Biology, 186(3). https://doi.org/10.1016/0022-2836(85)90137-8
[0581] Corrales-Aguilar, E., Hoffmann, K., & Hengel, H. (2014). CMV-encoded Fcγ receptors: modulators at the interface of innate and adaptive immunity. Seminars in Immunopathology, 36(6), 627-640.
[0582] Dekkers, G., Bentlage, A. E. H., Stegmann, T. C., Howie, H. L., Lissenberg-Thunnissen, S., Zimring, J., Rispens, T., & Vidarsson, G. (2017). Affinity of human IgG subclasses to mouse Fc gamma receptors. mAbs, 9(5), 767-773.
[0583] Delespesse, G., Hofstetter, H., & Sarfati, M. (1989). Low-affinity receptor for IgE (FcERII, CD23) and its soluble fragments. International Archives of Allergy and Applied Immunology, 90 Suppl 1, 41-44.
[0584] de Vries, E., Koene, H. R., Vossen, J. M., Gratama, J. W., von dem Borne, A. E., Waaijer, J. L., Haraldsson, A., de Haas, M., & van Tol, M. J. (1996). Identification of an unusual Fc gamma receptor IIIa (CD16) on natural killer cells in a patient with recurrent infections. Blood, 88(8), 3022-3027.
[0585] Dong, X., Storkus, W. J., & Salter, R. D. (1999). Binding and uptake of agalactosyl IgG by mannose receptor on macrophages and dendritic cells. Journal of Immunology, 163(10), 5427-5434.
[0586] Dubin, G., Frank, I., & Friedman, H. M. (1990). Herpes simplex virus type 1 encodes two Fc receptors which have different binding characteristics for monomeric immunoglobulin G (IgG) and IgG complexes. Journal of Virology, 64(6), 2725-2731.
[0587] Foote, J., & Winter, G. (1992). Antibody framework residues affecting the conformation of the hypervariable loops. Journal of Molecular Biology, 224(2). https://doi.org/10.1016/0022-2836(92)91010-m
[0588] Frey, S., Opazo, F., & Götzke, H. (2018). Target detection using a monovalent antibody (WIPO Patent No. 2018167141:A2). In World Patent (No. 2018167141:A2). https://patentimages.storage.googleapis.com/95/b5/e5/8702c689c5d90e/WO2018167141A2.pdf
[0589] Geddie, M. L., Kirpotin, D. B., Kohli, N., Komaga, T., Boll, B., Razlog, M., Drummond, D. C., & Lugovskoy, A. A. (2022). Development of disulfide-stabilized Fabs for targeting of antibody-directed nanotherapeutics. mAbs, 14(1). https://doi.org/10.1080/19420862.2022.2083466 Hagihara, Y., & Saerens, D. (2014). Engineering disulfide bonds within an antibody. Biochimica et Biophysica Acta, 1844(11), 2016-2023.
[0590] Halaby, D. M., Poupon, A., & Mornon, J. (1999). The immunoglobulin fold family: sequence analysis and 3D structure comparisons. Protein Engineering, 12(7). https://doi.org/10.1093/protein/12.7.563
[0591] Hallam, T. J., Wold, E., Wahl, A., & Smider, V. V. (2015). Antibody conjugates with unnatural amino acids. Molecular Pharmaceutics, 12(6), 1848-1862.
[0592] Hamilton, R. G., & Morrison, S. L. (1993). Epitope mapping of human immunoglobulin-specific murine monoclonal antibodies with domain-switched, deleted and point-mutated chimeric antibodies. Journal of Immunological Methods, 158(1), 107-122.
[0593] Hermans, W. J. J., Bezemer, S., & Mijnsbergen, Y. M. (2015). Single-domain antigen-binding proteins that bind mammalian IgG (U.S. Pat. No. 9,040,666). In US patent (U.S. Pat. No. 9,040,666). https://patentimages.storage.googleapis.com/a6/30/24/5c6331255c5ef5/US9040666.pdf
[0594] Hermans, W. J. J., Blokland, S., van Kesteren, M. A., Horrevoets, J. M., & Detmers, F. J. M. (2017). Antigen-binding protein directed against epitope in the CH1 domain of human IgG antibodies (U.S. Pat. No. 9,850,315). In US patent (U.S. Pat. No. 9,850,315). https://patentimages.storage.googleapis.com/61/e4/6a/1f1b6a48d95d10/US9850315.pdf
[0595] Herrmann, M., Krupka, C., Deiser, K., Brauchle, B., Marcinek, A., Ogrinc Wagner, A., Rataj, F., Mocikat, R., Metzeler, K. H., Spiekermann, K., Kobold, S., Fenn, N. C., Hopfner, K.-P., & Subklewe, M. (2018). Bifunctional PD-1×αCD3×αCD33 fusion protein reverses adaptive immune escape in acute myeloid leukemia. Blood, 132(23), 2484-2494.
[0596] Hogarth, P. M., & Wines, B. D. (2014). Multimeric Fc receptor polypeptides (U.S. Pat. No. 8,729,247). In US patent (U.S. Pat. No. 8,729,247). https://patentimages.storage.googleapis.com/2a/a6/81/a6474991b98b27/US8729247.pdf
[0597] Hulett, & Hogarth, P. M. (1998). The second and third extracellular domains of FcgammaRI (CD64) confer the unique high affinity binding of IgG2a. Molecular Immunology, 35(14-15). https://doi.org/10.1016/s0161-5890(98)00069-8
[0598] Jeffrey, S. C., Burke, P. J., Lyon, R. P., Meyer, D. W., Sussman, D., Anderson, M., Hunter, J. H., Leiske, C. I., Miyamoto, J. B., Nicholas, N. D., Okeley, N. M., Sanderson, R. J., Stone, I. J., Zeng, W., Gregson, S. J., Masterson, L., Tiberghien, A. C., Howard, P. W., Thurston, D. E., . . . Senter, P. D. (2013). A potent anti-CD70 antibody-drug conjugate combining a dimeric pyrrolobenzodiazepine drug with site-specific conjugation technology. Bioconjugate Chemistry, 24(7), 1256-1263.
[0599] Johnson, L. S., Li, H., & Tuaillon, N. (2010). FcgammaRIIB Fusion Proteins and Compositions Thereof (USPTO Patent No. 20100196372:A1). In US patent (No. 20100196372:A1). https://patentimages.storage.googleapis.com/3c/b3/a3/3703e4a4dd5edb/US20100196372A1.pdf
[0600] Junutula, J. R., Raab, H., Clark, S., Bhakta, S., Leipold, D. D., Weir, S., Chen, Y., Simpson, M., Tsai, S. P., Dennis, M. S., Lu, Y., Meng, Y. G., Ng, C., Yang, J., Lee, C. C., Duenas, E., Gorrell, J., Katta, V., Kim, A., . . . Mallet, W. (2008). Site-specific conjugation of a cytotoxic drug to an antibody improves the therapeutic index. Nature Biotechnology, 26(8), 925-932.
[0601] Kabat, E. A. (1992). Sequences of Proteins of Immunological Interest. DIANE Publishing.
[0602] Karsten, C. M., Pandey, M. K., Figge, J., Kilchenstein, R., Taylor, P. R., Rosas, M., McDonald, J. U., Orr, S. J., Berger, M., Petzold, D., Blanchard, V., Winkler, A., Hess, C., Reid, D. M., Majoul, I. V., Strait, R. T., Harris, N. L., Kohl, G., Wex, E., . . . Kohl, J. (2012). Anti-inflammatory activity of IgG1 mediated by Fc galactosylation and association of FcγRIIB and dectin-1. Nature Medicine, 18(9), 1401-1406.
[0603] Keeble, A. H., Khan, Z., Forster, A., & James, L. C. (2008). TRIM21 is an IgG receptor that is structurally, thermodynamically, and kinetically conserved. Proceedings of the National Academy of Sciences of the United States of America, 105(16), 6045-6050.
[0604] Leonard, E. K., Pellitero, M. A., Juelg, B., Spangler, J. B., & Arroyo-Curris, N. (2022). Antibody-Invertase Fusion Protein Enables Quantitative Detection of SARS-CoV-2 Antibodies Using Widely Available Glucometers. Journal of the American Chemical Society. https://doi.org/10.1021/jacs.2c02537
[0605] Litwin, V., Jackson, W., & Grose, C. (1992). Receptor properties of two varicella-zoster virus glycoproteins, gpI and gpIV, homologous to herpes simplex virus gE and gI. Journal of Virology, 66(6), 3643-3651.
[0606] Liu, H., Saxena, A., Sidhu, S. S., & Wu, D. (2017). Fc Engineering for Developing Therapeutic Bispecific Antibodies and Novel Scaffolds. Frontiers in Immunology, 8. https://doi.org/10.3389/fimmu.2017.00038
[0607] Liu, L., Lam, C.-Y. K., Alderson, R., Long, V., Yang, Y., Burns, R., Widjaja, L., Li, J., Wolf, C., Ciccarone, V., Tamura, J., Diedrich, G., Bonvini, E., Johnson, S., & Moore, P. A. (2019 Jul. 1). Abstract 1560: Selection of a bispecific trivalent HER2×CD137 TRIDENT format providing optimal tumor-anchored immune co-stimulation. Immunology. Proceedings: AACR Annual Meeting 2019; Mar. 29-Apr. 3, 2019; Atlanta, GA. https://doi.org/10.1158/1538-7445.sabcs18-1560
[0608] Miller, M. G., Ing, J. Y., Cheng, M. K.-W., Flitter, B. A., & Moe, G. R. (2013). Identification of a phage-encoded Ig-binding protein from invasive Neisseria meningitidis. Journal of Immunology, 191(6), 3287-3296.
[0609] Nakamura, H., Oda-Ueda, N., Ueda, T., & Ohkuri, T. (2018). A novel engineered interchain disulfide bond in the constant region enhances the thermostability of adalimumab Fab. Biochemical and Biophysical Research Communications, 495(1), 7-11.
[0610] Namboodiri, A. M., Budkowska, A., Nietert, P. J., & Pandey, J. P. (2007). Fc gamma receptor-like hepatitis C virus core protein binds differentially to IgG of discordant Fc (GM) genotypes. Molecular Immunology, 44(15), 3805-3808.
[0611] Oganesyan, V., Mazor, Y., Yang, C., Cook, K. E., Woods, R. M., Ferguson, A., Bowen, M. A., Martin, T., Zhu, J., Wu, H., & Dall'Acqua, W. F. (2015). Structural insights into the interaction of human IgG1 with FcγRI: no direct role of glycans in binding. Acta Crystallographica. Section D, Biological Crystallography, 71 (Pt 11), 2354.
[0612] Para, M. F., Baucke, R. B., & Spear, P. G. (1980). Immunoglobulin G(Fc)-binding receptors on virions of herpes simplex virus type 1 and transfer of these receptors to the cell surface by infection. Journal of Virology, 34(2), 512-520.
[0613] Patel, K. R., Roberts, J. T., & Barb, A. W. (2019). Multiple Variables at the Leukocyte Cell Surface Impact Fc γ Receptor-Dependent Mechanisms. Frontiers in Immunology, 10, 223.
[0614] Pillow, T. H., Tien, J., Parsons-Reponte, K. L., Bhakta, S., Li, H., Staben, L. R., Li, G., Chuh, J., Fourie-O'Donohue, A., Darwish, M., Yip, V., Liu, L., Leipold, D. D., Su, D., Wu, E., Spencer, S. D., Shen, B.-Q., Xu, K., Kozak, K. R., . . . Junutula, J. R. (2014). Site-specific trastuzumab maytansinoid antibody-drug conjugates with improved therapeutic activity through linker and antibody engineering. Journal of Medicinal Chemistry, 57(19), 7890-7899.
[0615] Prihoda, D., Maamary, J., Waight, A., Juan, V., Fayadat-Dilman, L., Svozil, D., & Bitton, D. A. (2022). BioPhi: A platform for antibody design, humanization, and humanness evaluation based on natural antibody repertoires and deep learning. mAbs, 14(1), 2020203.
[0616] Promsote, W., Xu, L., Hataye, J., Fabozzi, G., March, K., Almasri, C. G., DeMouth, M. E., Lovelace, S. E., Talana, C. A., Doria-Rose, N. A., McKee, K., Hait, S. H., Casazza, J. P., Ambrozak, D., Beninga, J., Rao, E., Furtmann, N., Birkenfeld, J., McCarthy, E., . . . Koup, R. A. (2023). Trispecific antibody targeting HIV-1 and T cells activates and eliminates latently-infected cells in HIV/SHIV infections. Nature Communications, 14(1), 1-13.
[0617] Raghavan, M., Chen, M. Y., Gastinel, L. N., & Bjorkman, P. J. (1994). Investigation of the interaction between the class I MHC-related Fc receptor and its immunoglobulin G ligand. Immunity, 1(4), 303-315.
[0618] Rueger, P., Schlothauer, T., & Seeber, S. (2018). METHOD FOR PRODUCING SOLUBLE FcR AS Fc-FUSION WITH INERT IMMUNOGLOBULIN Fc-REGION AND USES THEREOF (USPTO Patent No. 20180265564:A1). In US patent (No. 20180265564:A1). https://patentimages.storage.googleapis.com/64/a7/41/defc1adfda2cd5/US20180265564A1.pdf
[0619] Saunders, K. O. (2019). Conceptual Approaches to Modulating Antibody Effector Functions and Circulation Half-Life. Frontiers in Immunology, 10, 449325.
[0620] Shibata-Koyama, M., Iida, S., Okazaki, A., Mori, K., Kitajima-Miyama, K., Saitou, S., Kakita, S., Kanda, Y., Shitara, K., Kato, K., & Satoh, M. (2009). The N-linked oligosaccharide at FcγRIIIa Asn-45: an inhibitory element for high FcγRIIIa binding affinity to IgG glycoforms lacking core fucosylation. Glycobiology, 19(2), 126.
[0621] Shin, J.-S., & Greer, A. M. (2015). The role of FcεRI expressed in dendritic cells and monocytes. Cellular and Molecular Life Sciences: CMLS, 72(12), 2349-2360.
[0622] Strohl, W. R. (2015). Fusion Proteins for Half-Life Extension of Biologics as a Strategy to Make Biobetters. BioDrugs: Clinical Immunotherapeutics, Biopharmaceuticals and Gene Therapy, 29(4), 215.
[0623] Studnicka, G. M., Soares, S., Better, M., Williams, R. E., Nadell, R., & Horwitz, A. H. (1994). Human-engineered monoclonal antibodies retain full specific binding activity by preserving non-CDR complementarity-modulating residues. Protein Engineering, 7(6). https://doi.org/10.1093/protein/7.6.805
[0624] The second and third extracellular domains of FcγRI (CD64) confer the unique high affinity binding of IgG2a. (1998). Molecular Immunology, 35(14-15), 989-996.
[0625] Tumey, L. N., Li, F., Rago, B., Han, X., Loganzo, F., Musto, S., Graziani, E. I., Puthenveetil, S., Casavant, J., Marquette, K., Clark, T., Bikker, J., Bennett, E. M., Barletta, F., Piche-Nicholas, N., Tam, A., O'Donnell, C. J., Gerber, H. P., & Tchistiakova, L. (2017). Site Selection: a Case Study in the Identification of Optimal Cysteine Engineered Antibody Drug Conjugates. The AAPS Journal, 19(4), 1123-1135.
[0626] UniProt. (n.d.-a). Retrieved Jun. 27, 2024, from https://www.uniprot.org/uniprotkb/P08637/entry
[0627] UniProt. (n.d.-b). Retrieved Jun. 27, 2024, from https://www.uniprot.org/uniprotkb/O75015/entry
[0628] UniProt. (n.d.-c). Retrieved Jun. 27, 2024, from https://www.uniprot.org/uniprotkb/A0A0B4J1G0/entry
[0629] UniProt. (n.d.-d). Retrieved Jun. 27, 2024, from https://www.uniprot.org/uniprotkb/P12318/entry
[0630] UniProt. (n.d.-e). Retrieved Jun. 27, 2024, from https://www.uniprot.org/uniprotkb/P31994/publications
[0631] UniProt. (n.d.-f). Retrieved Jun. 27, 2024, from https://www.uniprot.org/uniprotkb/P12314/entry
[0632] UniProt. (n.d.-g). Retrieved Jun. 27, 2024, from https://www.uniprot.org/uniprotkb/P01833/entry
[0633] UniProt. (n.d.-h). Retrieved Jun. 27, 2024, from https://www.uniprot.org/uniprotkb/P24071/entry
[0634] UniProt. (n.d.-i). Retrieved Jun. 27, 2024, from https://www.uniprot.org/uniprotkb/Q8WWV6/entry
[0635] UniProt. (n.d.-j). Retrieved Jun. 27, 2024, from https://www.uniprot.org/uniprotkb/O60667/entry
[0636] UniProt. (n.d.-k). Retrieved Jun. 27, 2024, from https://www.uniprot.org/uniprotkb/P12319/entry
[0637] UniProt. (n.-d.-l). Retrieved Jun. 27, 2024, from https://www.uniprot.org/uniprotkb/P06734/entry
[0638] UniProt. (n.d.-m). Retrieved Jun. 27, 2024, from https://www.uniprot.org/uniprotkb/P55899/entry
[0639] Univ, K. (2010). IgG BINDING PEPTIDE (USPTO Patent No. 20100297606A1). In US patent (No. 20100297606A1). https://eureka.patsnap.com/patent-US20100297606A1
[0640] Vaks, L., Litvak-Greenfeld, D., Dror, S., Shefet-Carasso, L., Matatov, G., Nahary, L., Shapira, S., Hakim, R., Alroy, I., & Benhar, I. (2018). Design Principles for Bispecific IgGs, Opportunities and Pitfalls of Artificial Disulfide Bonds. Antibodies (Basel, Switzerland), 7(3). https://doi.org/10.3390/antib7030027
[0641] Wang, C., Wu, Y., Wang, L., Hong, B., Jin, Y., Hu, D., Chen, G., Kong, Y., Huang, A., Hua, G., & Ying, T. (2017). Engineered Soluble Monomeric IgG1 Fc with Significantly Decreased Non-Specific Binding. Frontiers in Immunology, 8, 302778.
[0642] Website. (n.d.-a). https://www.ncbi.nlm.nih.gov/pmc/articles/PMC3220521/,
[0643] Website. (n.d.-b). https://www.uniprot.org/uniprotkb/Q96RD9/entry
[0644] Wilson, T. J., Fuchs, A., & Colonna, M. (2012). Cutting edge: human FcRL4 and FcRL5 are receptors for IgA and IgG. Journal of Immunology, 188(10), 4741-4745.
[0645] Zappala, F., Higbee-Dempsey, E., Jang, B., Miller, J., Yan, L., Minutolo, N. G., Rosado Gonzilez, G. T., Tsourkas, A., & Ozdemir, B. A. (2022). Rapid, site-specific labeling of “off-the-shelf” and native serum autoantibodies with T cell-redirecting domains. Science Advances. https://doi.org/10.112 6/sciadv.abn4613
[0646] Multiple resolution—JaLC. (n.d.). Retrieved Jun. 27, 2024, from https://doi.org/10.15017/1931748
[0647] Ji Yi H K. (2021). Mouse anti-human IgG monoclonal antibody (Patent No. CN:112010981:B). In patent (No. CN:112010981:B). https://patentimages.storage.googleapis.com/72/3d/18/159b852f4b070e/CN112010981B.pdf

What is claimed is:

1. A heterologous polypeptide comprising:
at least one immunoglobulin binding domain; and
at least one immune cell surface protein-binding domain;
wherein the at least one immunoglobulin binding domain is derived from an Fc receptor or Fc binder, including but not limited to, FcγRIII, mFcγRIV, FcγRIIa, FcγRIIb, FcγRIIc, FcγRI, mFcγRIII, mFcγRIIa, mFcγRIIb, mFcγRI, FcαRI, C1q, FcRL, FcRL5, pIgR, Fcα/μR, FcμR, FcεRI, FcεRII, FcRn, TRIM21, allotypes, derivatives and analogs thereof;
wherein the at least one immunoglobulin binding domain is derived from an antigen-binding domain, antibody or antigen-binding fragment, variants, derivatives or analogs thereof comprising VH and VL pairs, ScFv, Fab, IgG, sdAb-VL, sdAb-VH, VHH or avimer, derivatives or analogs thereof,
wherein the heterologous polypeptide comprises one or more half-life extension domains comprising anti-HSA antigen-binding domain, antibody or antigen-binding fragment, variants, derivatives or analogs thereof comprising VHH or single domain antibodies, immunoglobulin IgG Fc domains their variants, derivatives or analogs thereof;
wherein the heterologous polypeptide comprises at least two immunoglobulin binding domains; and
wherein the heterologous polypeptide comprises at least two immune cell surface protein-binding domains.

2. A heterologous polypeptide comprising:
at least one immunoglobulin binding domain; and
at least one immune cell surface protein-binding domain;
wherein the at least one immunoglobulin binding domain comprises all or a portion of the Fc receptor of SEQ ID NO: 1, 2, 3, 4, 5, 6, 7, 8, 9, 10, 11, 12, 13, 14, 15, 16, 17, 18, 19, 20, 23, 77, 80, 271, 272, 273, 274, 275, 276, 277, 294, 296, 298, 300, 324 and 325;
wherein the at least one immunoglobulin binding domain is derived from FcγRIIa comprising one or more mutations comprising R56H, K118N, T120V, L160Q and V172E of SEQ ID NO: 9; or
wherein the at least one immunoglobulin binding domain is derived from FcγRIII comprising one or more mutations comprising S181P, K122N, T124V, Q176E, 190R, T118K, A119L and Y134F of SEQ ID NO: 1;
wherein the heterologous polypeptide comprises at least two immunoglobulin binding domains; and
wherein the heterologous polypeptide comprises at least two immune cell surface protein-binding domains.

3. A heterologous polypeptide comprising:
at least one immunoglobulin binding domain; and
at least one immune cell surface protein-binding domain;
wherein the at least one immunoglobulin binding domain is derived from an antigen-binding domain, antibody or antigen-binding fragment their variants, derivatives or analogs thereof, including but not limited to, VH and VL pairs, ScFv, Fab, IgG, sdAb-VL, sdAb-VH, VHH or avimer, their derivatives or analogs thereof,
wherein the at least one immunoglobulin binding domain comprises at least one of the CDR or FR regions in SEQ ID NO: 569, 570, 571, 572, 573, 574, 575, 576, 577, 578, 579, 580, 581, 582, 583, 584, 585, 586, 587, 588, 589, 590, 591, 592, 593, 594, 595, 596, 597, 598, 599, 601, 602, 603, 604, 605,606, 607, 608, 609, 610, 611,612, 613, 614, 615, 616, 617, 618, 619, 620, 621, 622, 623, 624, 625, 626, 627, 628, 629, 6230, 631, 632, 633, 634, 635, 636, 637, 638, 639, 640, 641, 642, 643, 644, 645, 646, 647, 648, 649, 650, 651, 652, 653, 654, 655, 656, 657, or the avimer defined in SEQ ID NO: 132;
wherein the heterologous polypeptide comprises at least two immunoglobulin binding domains; and
wherein the heterologous polypeptide comprises at least two immune cell surface protein-binding domains.

4. A heterologous polypeptide comprising:
at least one immunoglobulin binding domain;
at least one immune cell surface protein-binding domain;
wherein at least one immune cell surface protein-binding domain is derived from an antigen-binding domain, antibody or antigen-binding fragment their variants, derivatives or analogs thereof, including but not limited to, VH and VL pairs, ScFv, Fab, IgG, sdAb-VL, sdAb-VH, VHH, their derivatives or analogs thereof;
wherein the immune cell surface protein-binding domain comprises one or more CDR or FR regions in SEQ ID NO: 580, 606, 608, 609, 610, 611, 612, 615, 626, 635, 636, 637, 638, 639, 658, 659, 660, 661, 662, 663, 664, 665, 666, 667, 668, 669, 670, 671, 672, 673, 674, 675, 676, 677, 678, 679, 680, 681, 682, 683, 684, 685, 686, 687, 688, 689, 690, 691, 692, 693, 694, 695, 696, 697, 698, 699, 700, 701, 702, 703, 704, 705,706, 707, 708, 709, 710, 711,712, 713, 714, 715, 716, 717, 718, 719, 720, 721, 722, 723, 724, 725, 726, 727, 728, 729, 730, 731, 732, 733, 734, 735, 736, 737, 738, 739, 740, 741, 742, 743, 744, 745, 746, 747, 748, 749, 750, 751, 752, 753, 754, 755, 756, 757, 758, 759, 760, 761, 762, 763, 764, 765, 766, 767, 768, 769, 770, 771, 772, 773, 774, 775, 776, 777, 778, 779, 780, 781, 782, 783, 784, 785, 786, 787, 788, 789, 790, 791, 792, 793, 794, 795, 796, 797, 798, 799, 800, 801, 802, 803, 804, 805, 806, 807, 808, 809, 810, 811, 812, 813, 814, 815, 816, 817, 818, 819, 820, 821, 822, 823, 824, 825, 826, 827, 828, 829, 840, 841, 842, 843, 844, 845, 846, 847, 848, 849, 840, 841, 842, 843, 844, 845, 846, 847, 848, 849, 850, 851, 852, 853, 854, 855, 856, 857, 858, 859, 860, 861, 862, 863, 864, 865, 866, 867, 868, 869, 870, 871, 872, 873, 874, 875, 876, 877, 878, 879, 880, 881, 882, 883, 884, 885, 886, 887, 888, 889, 890, 891, 892, 893, 894, 895, 896, 897, 898, 899, 900, 901, 902, 903, 904, 905, 906, 907, 908, 909, 910, 911,912, 913, 914, 915, 916, 917, 918, 919, 920, 921, 922, 923, 924, 925, 926, 927, 928, 929, 940, 941, 942, 943, 944, 945, 946, 947, 948, 949, 940, 941, 942, 943, 944, 945, 946, 947, 948, 949, 950, 951, 952, 953, 954, 955, 956, 957, 958, 959, 960, 961, 962, 963, 964, 965, 966, 967, 968, 969, 970, 971, 972, 973, 974, 975, 976, 977, 978, 979, 980, 981, 982, 983, 984, 985, 986, 987, 988, 989, 990, 991, 992, 993, 994, 995, 996, 997, 998, 999, 1000, 1001, 1002, 1003, 1004, 1005, 1006, 1007, 1008, 1009, 1010, 1011, 1012, 1013, 1014, 1015, 1016, 1017, 1018, 1019, 1020, 1021, 1022, 1023, 1024, 1025, 1026, 1027, 1028, 1029, 1030, 1031, 1032, 1033, 1034, 1035, 1036, 1037, 1038, 1039, 1040, 1041, 1042, 1043, 1044, 1045, 1046 and 1047;
wherein the heterologous polypeptide comprises at least two immunoglobulin binding domains; and
wherein the heterologous polypeptide comprises at least two immune cell surface protein-binding domains.

5. A heterologous polypeptide comprising:
at least one immunoglobulin binding domain;
at least one immune cell surface protein-binding domain;
at least one half-life extension domain;
wherein the at least one half-life extension domain comprises anti-HSA antigen-binding domain, antibody or antigen-binding fragment their variants, derivatives or analogs thereof comprising VHH or single domain antibodies, comprising one or more CDR or FR regions in SEQ ID NO: 558, 559, 560, 561, 562, 563, 564, 565, 566, 567 and 568;
wherein the heterologous polypeptide comprises at least two immunoglobulin binding domains; and
wherein the heterologous polypeptide comprises at least two immune cell surface protein-binding domains.

6. A heterologous polypeptide comprising:
at least one immunoglobulin binding domain;
at least one immune cell surface protein-binding domain;
at least one half-life extension domain;
wherein the heterologous polypeptide is a single chain of the structure:
D1-D2-D3
and
wherein the at least one half-life extension domain comprises anti-HSA antigen-binding domain, antibody or antigen-binding fragment their variants, derivatives or analogs thereof comprising VHH or single domain antibodies, comprising one or more CDR or FR regions in SEQ ID NO: 558, 559, 560, 561, 562, 563, 564, 565, 566, 567 and 568.

7. The heterologous polypeptide of claim 5, further comprising one or more linkers between the domains.

8. A heterologous polypeptide comprising:
at least two immunoglobulin binding domain;
at least one immune cell surface protein-binding domain;
at least one half-life extension domain;
wherein the heterologous polypeptide is a single chain with at least four domains of the structure:
D1-D2-D3-D4
and
wherein the at least one half-life extension domain comprises anti-HSA antigen-binding domain, antibody or antigen-binding fragment their variants, derivatives or analogs thereof comprising VHH or single domain antibodies, comprising one or more CDR or FR regions in SEQ ID NO: 558, 559, 560, 561, 562, 563, 564, 565, 566, 567 and 568.

9. The heterologous polypeptide of claim 6, further comprising one or more linkers between the domains.

10. A multimeric protein wherein regions of the molecule comprise:
at least one immunoglobulin binding domain;
at least one immune cell surface protein-binding domain; and
two half-life extension domains comprising a first Fc polypeptide and a second Fc polypeptide derived from an immunoglobulin wherein the Fc does not substantially bind the immunoglobulin binding domain;
wherein the first Fc polypeptide and the second Fc polypeptide comprise a hetero-multimerization domain wherein the hetero-multimerization domain is at least one knob into hole mutation;
wherein the multimeric protein comprises at least two immunoglobulin binding domains; and
wherein the multimeric protein comprises at least two immune cell surface protein-binding domains.

11. A multimeric protein wherein regions of the molecule comprise:
at least one immunoglobulin binding domain;
at least one immune cell surface protein-binding domain;
two half-life extension domains comprising a first Fc polypeptide and a second Fc polypeptide derived from an immunoglobulin wherein the Fc does not substantially bind the immunoglobulin binding domain by selection of a IgG heavy chain Fc polypeptide comprising mutations L234A, L235A and P329A or P329G in the constant heavy chain domain 2 (EU Numbering);
wherein the first Fc polypeptide and the second Fc polypeptide comprise a hetero-multimerization domain wherein the hetero-multimerization domain is at least one knob into hole mutation;
wherein the multimeric protein comprises at least two immunoglobulin binding domains; and
wherein the multimeric protein comprises at least two immune cell surface protein-binding domains.

12. A multimeric protein wherein regions of the molecule comprise:
at least one immunoglobulin binding domain;
at least one immune cell surface protein-binding domain;
two half-life extension domains including but not limited to a first Fc polypeptide and a second Fc polypeptide derived from an immunoglobulin wherein the Fc does not substantially bind said immunoglobulin binding domain by selection of a IgG heavy chain Fc polypeptide comprising mutations L234A, L235A and P329A or P329G in the constant heavy chain domain 2 (EU Numbering);
wherein the first Fc polypeptide comprises mutation T366W; and
wherein the second Fc polypeptide comprises T366S, L368A and Y407V in the constant heavy chain domain 3 (EU Numbering);
wherein the first Fc polypeptide further comprises S354C and wherein the second Fc polypeptide further comprises Y349C in the constant heavy chain domain 3 (EU Numbering);
wherein the multimeric protein comprises at least two immunoglobulin binding domains; and
wherein the multimeric protein comprises at least two immune cell surface protein-binding domains.

13. A multimeric protein wherein regions of the molecule comprise:
at least one immunoglobulin binding domain;
at least one immune cell surface protein-binding domain;
at least one immunoglobulin kappa or lambda constant light chain, their variants, derivatives and analogs thereof;
at least one immunoglobulin constant heavy chain domain 1 and at least a portion of the immunoglobulin hinge region, their variants, derivatives and analogs thereof;
wherein the one or more constant heavy chain domain 1 and at least a portion of the hinge comprises mutation C233S and constant light chain C214S (Kabat Numbering);
wherein the one or more constant heavy chain domain 1 and at least a portion of the hinge comprises mutation C233S and F174C and constant light chain C214S and S176C (Kabat Numbering);
wherein at least a first pair of constant heavy chain and at least a portion of the hinge that comprises no mutation at C233 and no mutation in constant light chain at C214 and at least a second pair of constant heavy chain domain 1 at least a portion of the hinge comprises mutation C233S or the like and constant light chain C214S or the like (Kabat Numbering);
wherein at least a first pair of constant heavy chain and at least a portion of the hinge that contain no mutation at C233 and no mutation in constant light chain at C214 and at least a second pair of constant heavy chain domain 1 and at least a portion of the hinge comprises mutation C233S and F174C and the constant light chain comprises mutation C214S and S176C (Kabat Numbering);
wherein at least a first pair of constant heavy chain domain 1 and at least a portion of the hinge comprises mutation C233S and constant light chain C214S and at least a second pair of constant heavy chain domain 1 and at least a portion of the contains mutation C233S and F174C and constant light chain C214S and S176C (Kabat Numbering);
wherein the heterologous polypeptide comprises one or more half-life extension domains comprising anti-HSA antigen-binding domain, antibody or antigen-binding fragment, variants, derivatives or analogs thereof comprising VHH or single domain antibodies, immunoglobulin IgG Fc domains their variants, derivatives or analogs thereof;
wherein the multimeric protein comprises at least two immunoglobulin binding domains;
and
wherein the multimeric protein comprises at least two immune cell surface protein-binding domains.

14. A multimeric protein wherein a region or regions of the molecule comprise:
at least two immunoglobulin binding domain;
at least one immune cell surface protein-binding domain;
at least a second immunoglobulin-binding domain wherein the second immunoglobulin binding domain is separated from the first immunoglobulin binding domain by a linker from 1 amino acid to 20 amino acids comprising regions of the human constant heavy chain domain 1, kappa chain domain, lambda chain domain, polypeptides comprising linkers 13 amino acids or less, linkers comprising 6 amino acids or less, the constant heavy chain domain 1 derived spacer ASTKGPSVFPLAP, ASTKGP or ASTKGPSVFPLAS, the constant kappa chain derived spacer RTVAAPSVFIFPP or RTVAAP, the constant lambda chain derived spacer SQPKAAPSVTLFP, GQPKANPTVTLFP, GQPKAAPSVTLFP, SQPKAA, GQPKAN or GQPKAA, (GGGS)₁, (GGGS)₂, (GGGS)₃, (GGGS)₄;
wherein at least one immunoglobulin binding domain comprises one or more CDR or FR regions in SEQ ID NO: 569, 570, 571, 572, 573, 574, 575, 576, 577, 578, 579, 580, 581, 582, 583, 584, 585, 586, 587, 588, 589, 590, 591, 592, 593, 594, 595, 596, 597, 598, 599, 601, 602, 603, 604, 605,606, 607, 608, 609, 610, 611,612, 613, 614, 615, 616, 617, 618, 619, 620, 621, 622, 623, 624, 625, 626, 627, 628, 629, 6230, 631, 632, 633, 634, 635, 636, 637, 638, 639, 640, 641, 642, 643, 644, 645, 646, 647, 648, 649, 650, 651, 652, 653, 654, 655, 656, 657, or the avimer defined in SEQ ID NO: 132; and
wherein at least a second immunoglobulin-binding domain wherein the second immunoglobulin-binding domain is the same as the first immunoglobulin-binding domain; or
wherein at least a second immunoglobulin-binding domain wherein the second immunoglobulin-binding domain is different from the first immunoglobulin-binding domain.

15. A multimeric protein wherein at least one region comprises:
at least one immunoglobulin binding domain;
at least one immune cell surface protein binding domain;
one or more amino acid mutations in one or more constant or framework domains of human IgG1, IgG2, IgG3 or IgG4, variants, derivatives and analogs thereof wherein the immunoglobulin binding domain does not substantially bind itself or another region or regions of the molecule;
wherein a mutation of one or more amino acids in the constant heavy chain domain 1 comprising F122Y, P126S and K213E (Kabat Numbering);
wherein a mutation of one or more amino acids in a in the constant heavy chain domain 2 comprising N276K, L309V, L234A, L235A and P329A or P329G (EU Numbering);
wherein a heterologous polypeptide or multimeric protein and nucleic acids encoding the same, comprises at least two immunoglobulin binding domains; and
wherein a heterologous polypeptide or multimeric protein and nucleic acids encoding the same, comprises at least two immune cell surface protein binding domains.

16. A multimeric protein wherein regions of the molecule comprise:
at least one immunoglobulin kappa or lambda constant light chain, their variants, derivatives and analogs thereof, and
at least one immunoglobulin constant heavy chain domain 1 and at least a portion of the immunoglobulin hinge region, their variants, derivatives and analogs thereof, and
two half-life extension domains comprising a first Fc polypeptide and a second Fc polypeptide derived from an immunoglobulin wherein the first and second Fc polypeptides comprise a hetero-multimerization domain wherein the hetero-multimerization domain is selected from at least one knob into hole mutation;
wherein the first Fc polypeptide comprises T366W and wherein the second Fc polypeptide comprises T366S, L368A and Y407V in the constant heavy chain domain 3 (EU Numbering);
wherein the Fc does not substantially bind one or more of its cognate Fc receptors by selection of IgG heavy chain Fc polypeptide comprising L234A, L235A and P329A in the constant heavy chain domain 2 (EU Numbering);
wherein one or more constant heavy chain domain 1 and all, none or a portion of the hinge comprises mutation C233S and constant light chain C214S (Kabat Numbering);
wherein one or more constant heavy chain domain 1 and at least a portion of the hinge comprises mutation C233S and F174C and constant light chain C214S and S176C (Kabat Numbering);
wherein at least a first pair of constant heavy chain and at least a portion of the hinge that comprises no mutation at C233 and no mutation in constant light chain at C214 and at least a second pair of constant heavy chain domain 1 and at least a portion of the hinge comprises a mutation at C233S and a constant light chain C214S (Kabat Numbering);
wherein at least a first pair of constant heavy chain and at least a portion of the hinge that contain no mutation at C233 and no mutation in constant light chain at C214 and at least a second pair of constant heavy chain domain 1 and at least a portion of the hinge comprises mutations at C233S and F174C and the constant light chain comprises mutation C214S and S176C (Kabat Numbering);
wherein at least a first pair of constant heavy chain domain 1 and at least a portion of the hinge comprises a mutation at C233S and constant light chain C214S and at least a second pair of constant heavy chain domain 1 and at least a portion of the hinge contains mutation C233S and F174C and constant light chain C214S and S176C (Kabat Numbering).

17. The multimeric protein of claim 16
wherein the first Fc polypeptide further comprises S354C and wherein the second Fc polypeptide further comprises Y349C in the constant heavy chain domain 3 (EU Numbering); and
wherein IgG heavy chain Fc polypeptide further comprises P329G in the constant heavy chain domain 2 (EU Numbering).

18. A heterologous polypeptide or multimeric protein of claim 1 wherein an additional region of the molecule comprises a free cysteine at or near the C-terminus.

19. A heterologous polypeptide or multimeric protein of claim 1 wherein an additional region of the molecule comprises a covalently linked PEG-lipid.

20. A method of treatment comprising administering the heterologous polypeptide or multimeric protein of claim 1 to a patient in need thereof to treat disease as a monotherapy.

21. A method of treatment comprising administering the heterologous polypeptide or multimeric protein of claim 1 to a subject in need thereof to treat cancer, immune disorders, or pathogenic infections in combination with at least one selected from standard, current, or experimental therapeutics.

22. A nucleotide encoding the heterologous polypeptide or multimeric protein of claim 1.

23. A kit comprising the heterologous polypeptide or multimeric protein of claim 1.

The application's sequence listing, which the Patent Office published only in electronic form, follows.

SEQUENCE LISTING (1284 sequences)

SEQ ID NO: 1 - protein, 192 aa, synthetic construct
GMRTEDLPKAVVFLEPQWYRVLEKDSVTLKCQGAYSPEDNSTQWFHNESLISSQASSYFIDAATVDDSGEYRCQTNLSTLSDPVQLEVHIGWLLLQAPRWVFKEEDPIHLRCHSWKNTALHKVTYLQNGKGRKYFHHNSDFYIPKATLKDSGSYFCRGLVGSKNVSSETVNITITQGLAVSTISSFFPPGYQ

SEQ ID NO: 2 - protein, 192 aa, synthetic construct
GMRTEDLPKAVVFLEPQWYRVLEKDSVTLKCQGAYSPEDNSTQWFHNESLISSQASSYFIDAATVDDSGEYRCQTNLSTLSDPVQLEVHIGWLLLQAPRWVFKEEDPIHLRCHSWKNTALHKVTYLQNGKGRKYFHHNSDFYIPKATLKDSGSYFCRGLFGSKNVSSETVNITITQGLAVSTISSFFPPGYQ

SEQ ID NO: 3 - protein, 177 aa, synthetic construct
GMRTEDLPKAVVFLEPQWYRVLEKDSVTLKCQGAYSPEDNSTQWFHNESLISSQASSYFIDAATVDDSGEYRCQTNLSTLSDPVQLEVHIGWLLLQAPRWVFKEEDPIHLRCHSWKNTALHKVTYLQNGKGRKYFHHNSDFYIPKATLKDSGSYFCRGLVGSKNVSSETVNITITQG

SEQ ID NO: 4 - protein, 177 aa, synthetic construct
GMRTEDLPKAVVFLEPQWYRVLEKDSVTLKCQGAYSPEDNSTQWFHNESLISSQASSYFIDAATVDDSGEYRCQTNLSTLSDPVQLEVHIGWLLLQAPRWVFKEEDPIHLRCHSWKNTALHKVTYLQNGKGRKYFHHNSDFYIPKATLKDSGSYFCRGLFGSKNVSSETVNITITQG

SEQ ID NO: 5 - protein, 192 aa, synthetic construct
GMRTEDLPKAVVFLEPQWYSVLEKDSVTLKCQGAYSPEDNSTQWFHNESLISSQASSYFIDDATVNDSGEYRCQTNLSTLSDPVQLEVHIGWLLLQAPRWVFKEEDPIHLRCHSWKNTALHKVTYLQNGKDRKYFHHNSDFHIPKATLKDSGSYFCRGLVGSKNVSSETVNITITQGLAVSTISSFSPPGYQ

SEQ ID NO: 6 - protein, 192 aa, synthetic construct
GMRTEDLPKAVVFLEPQWYRVLEKDSVTLKCQGAYSPEDNSTQWFHNENLISSQASSYFIDAATVDDSGEYRCQTNLSTLSDPVQLEVHVGWLLLQAPRWVFKEEDPIHLRCHSWKNTALHKVTYLQNGKDRKYFHHNSDFHIPKATLKDSGSYFCRGLVGSKNVSSETVNITITQGLAVSTISSFSPPGYQ

SEQ ID NO: 7 - protein, 192 aa, synthetic construct
GMRTEDLPKAVVFLEPQWYSVLEKDSVTLKCQGAYSPEDNSTQWFHNESLISSQASSYFIDAATVNDSGEYRCQTNLSTLSDPVQLEVHIGWLLLQAPRWVFKEEDPIHLRCHSWKNTALHKVTYLQNGKDRKYFHHNSDFHIPKATLKDSGSYFCRGLVGSKNVSSETVNITITQGLAVSTISSFSPPGYQ

SEQ ID NO: 8 - protein, 183 aa, synthetic construct
GLQKAVVNLDPKWVRVLEEDSVTLRCQGTFSPEDNSIKWFHNESLIPHQDANYVIQSARVKDSGMYRCQTALSTISDPVQLEVHMGWLLLQTTKWLFQEGDPIHLRCHSWQNRPVRKVTYLQNGKGKKYFHENSELLIPKATHNDSGSYFCRGLIGHNNKSSASFRISLGDPGSPSMFPPWHQ

SEQ ID NO: 9 - protein, 182 aa, synthetic construct
AAPPKAVLKLEPPWINVLQEDSVTLTCQGARSPESDSIQWFHNGNLIPTHTQPSYRFKANNNDSGEYTCQTGQTSLSDPVHLTVLSEWLVLQTPHLEFQEGETIMLRCHSWKDKPLVKVTFFQNGKSQKFSHLDPTFSIPQANHSHSGDYHCTGNIGYTLFSSKPVTITVQVPSMGSSSPMG

SEQ ID NO: 10 - protein, 182 aa, synthetic construct
AAPPKAVLKLEPPWINVLQEDSVTLTCQGARSPESDSIQWFHNGNLIPTHTQPSYRFKANNNDSGEYTCQTGQTSLSDPVHLTVLSEWLVLQTPHLEFQEGETIMLRCHSWKDKPLVKVTFFQNGKSQKFSRLDPTFSIPQANHSHSGDYHCTGNIGYTLFSSKPVTITVQVPSMGSSSPMG

SEQ ID NO: 11 - protein, 172 aa, synthetic construct
APPKAVLKLEPQWINVLQEDSVTLTCRGTHSPESDSIQWFHNGNLIPTHTQPSYRFKANNNDSGEYTCQTGQTSLSDPVHLTVLSEWLVLQTPHLEFQEGETIVLRCHSWKDKPLVKVTFFQNGKSKKFSRSDPNFSIPQANHSHSGDYHCTGNIGYTLYSSKPVTITVQAP

SEQ ID NO: 12 - protein, 268 aa, synthetic construct
KAVITLQPPWVSVFQEETVTLHCEVLHLPGSSSTQWFLNGTATQTSTPSYRITSASVNDSGEYRCQRGLSGRSDPIQLEIHRGWLLLQVSSRVFTEGEPLALRCHAWKDKLVYNVLYYRNGKAFKFFHWNSNLTILKTNISHNGTYHCSGMGKHRYTSAGISVTVKELFPAPVLNASVTSPLLEGNLVTLSCETKLLLQRPGLQLYFSFYMGSKTLRGRNTSSEYQILTARREDSGLYWCEAATEDGNVLKRSPELELQVLGLQLPTP

SEQ ID NO: 13 - protein, 829 aa, synthetic construct
QFARTPRPIIFLQPPWTTVFQGERVTLTCKGFRFYSPQKTKWYHRYLGKEILRETPDNILEVQESGEYRCQAQGSPLSSPVHLDFSSASLILQAPLSVFEGDSVVLRCRAKAEVTLNNTIYKNDNVLAFLNKRTDFHIPHACLKDNGAYRCTGYKESCCPVSSNTVKIQVQEPFTRPVLRASSFQPISGNPVTLTCETQLSLERSDVPLRFRFFRDDQTLGLGWSLSPNFQITAMWSKDSGFYWCKAATMPYSVISDSPRSWIQVQIPASHPVLTLSPEKALNFEGTKVTLHCETQEDSLRTLYRFYHEGVPLRHKSVRCERGASISFSLTTENSGNYYCTADNGLGAKPSKAVSLSVTVPVSHPVLNLSSPEDLIFEGAKVTLHCEAQRGSLPILYQFHHEGAALERRSANSAGGVAISFSLTAEHSGNYYCTADNGFGPQRSKAVSLSVTVPVSHPVLTLSSAEALTFEGATVTLHCEVQRGSPQILYQFYHEDMPLWSSSTPSVGRVSFSFSLTEGHSGNYYCTADNGFGPQRSEVVSLFVTVPVSRPILTLRVPRAQAVVGDLLELHCEAPRGSPPILYWFYHEDVTLGSSSAPSGGEASFNLSLTAEHSGNYSCEANNGLVAQHSDTISLSVIVPVSRPILTFRAPRAQAVVGDLLELHCEALRGSSPILYWFYHEDVTLGKISAPSGGGASFNLSLTTEHSGIYSCEADNGLEAQRSEMVTLKVAVPVSRPVLTLRAPGTHAAVGDLLELHCEALRGSPLILYRFFHEDVTLGNRSSPSGGASLNLSLTAEHSGNYSCEADNGLGAQRSETVTLYITGLTANR

SEQ ID NO: 14 - protein, 620 aa, synthetic construct
KSPIFGPEEVNSVEGNSVSITCYYPPTSVNRHTRKYWCRQGARGGCITLISSEGYVSSKYAGRANLTNFPENGTFVVNIAQLSQDDSGRYKCGLGINSRGLSFDVSLEVSQGPGLLNDTKVYTVDLGRTVTINCPFKTENAQKRKSLYKQIGLYPVLVIDSSGYVNPNYTGRIRLDIQGTGQLLFSVVINQLRLSDAGQYLCQAGDDSNSNKKNADLQVLKPEPELVYEDLRGSVTFHCALGPEVANVAKFLCRQSSGENCDVVVNTLGKRAPAFEGRILLNPQDKDGSFSVVITGLRKEDAGRYLCGAHSDGQLQEGSPIQAWQLFVNEESTIPRSPTVVKGVAGGSVAVLCPYNRKESKSIKYWCLWEGAQNGRCPLLVDSEGWVKAQYEGRLSLLEEPGNGTFTVILNQLTSRDAGFYWCLTNGDTLWRTTVEIKIIEGEPNLKVPGNVTAVLGETLKVPCHFPCKFSSYEKYWCKWNNTGCQALPSQDEGPSKAFVNCDENSRLVSLTLNLVTRADEGWYWCGVKQGHFYGETAAVYVAVEERKAAGSRDVSLAKADAAPDEKVLDSGFREIENKAIQDPRLFAEEKAVADTRDQADGSRASVDSGSSEEQGGSSR

SEQ ID NO: 15 - protein, 206 aa, synthetic construct
QEGDFPMPFISAKSSPVIPLDGSVKIQCQAIREAYLTQLMIIKNSTYREIGRRLKFWNETDPEFVIDHMDANKAGRYQCQYRIGHYRFRYSDTLELVVTGLYGKPFLSADRGLVLMPGENISLTCSSAHIPFDRFSLAKEGELSLPQHQSGEHPANFSLGPVDLNVSGIYRCYGWYNRSPYLWSFPSNALELVVTDSIHQDYTTQN

SEQ ID NO: 16 - protein, 434 aa, synthetic construct
LPQKRPHPRWLWEGSLPSRTHLRAMGTLRPSSPLCWREESSFAAPNSLKGSRLVSGEPGGAVTIQCHYAPSSVNRHQRKYWCRLGPPRWICQTIVSTNQYTHHRYRDRVALTDFPQRGLFVVRLSQLSPDDIGCYLCGIGSENNMLFLSMNLTISAGPASTLPTATPAAGELTMRSYGTASPVANRWTPGTTQTLGQGTAWDTVASTPGTSKTTASAEGRRTPGATRPAAPGTGSWAEGSVKAPAPIPESPPSKSRSMSNTTEGVWEGTRSSVTNRARASKDRREMTTTKADRPREDIEGVRIALDAAKKVLGTIGPPALVSETLAWEILPQATPVSKQQSQGSIGETTPAAGMWTLGTPAADVWILGTPAADVWTSMEAASGEGSAAGDLDAATGDRGPQATLSQTPAVGPWGPPGKESSVKRTFPEDESSSR

SEQ ID NO: 17 - protein, 234 aa, synthetic construct
RILPEVKVEGELGGSVTIKCPLPEMHVRIYLCREMAGSGTCGTVVSTTNFIKAEYKGRVTLKQYPRKNLFLVEVTQLTESDSGVYACGAGMNTDRGKTQKVTLNVHSEYEPSWEEQPMPETPKWFHLPYLFQMPAYASSSKFVTRVTTPAQRGKVPPVHHSSPTTQITHRPRVSRASSVAGDKPRTFLPSTTASKISALEGLLKPQTPSYNHHTRLHRQRALDYGSQSGREGQG

SEQ ID NO: 18 - protein, 180 aa, synthetic construct
VPQKPKVSLNPPWNRIFKGENVTLTCNGNNFFEVSSTKWFHNGSLSEETNSSLNIVNAKFEDSGEYKCQHQQVNESEPVYLEVFSDWLLLQASAEVVMEGQPLFLRCHGWRNWDVYKVIYYKDGEALKYWYENHNISITNATVEDSGTYYCTGKVWQLDYESEPLNITVIKAPREKYWLQ

SEQ ID NO: 19 - protein, 274 aa, synthetic construct
DTTQSLKQLEERAARNVSQVSKNLESHHGDQMAQKSQSTQISQELEELRAEQQRLKSQDLELSWNLNGLQADLSSFKSQELNERNEASDLLERLREEVTKLRMELQVSSGFVCNTCPEKWINFQRKCYYFGKGTKQWVHARYACDDMEGQLVSIHSPEEQDFLTKHASHTGSWIGLRNLDLKGEFIWVDGSHVDYSNWAPGEPTSRSQGEDCVMMRGSGRWNDAFCDRKLGAWVCDRLATCTPPASEGSAESMGPDSRPDPDGRLPTPSAPLHS

SEQ ID NO: 20 - protein, 274 aa, synthetic construct
AESHLSLLYHLTAVSSPAPGTPAFWVSGWLGPQQYLSYNSLRGEAEPCGAWVWENQVSWYWEKETTDLRIKEKLFLEAFKALGGKGPYTLQGLLGCELGPDNTSVPTAKFALNGEEFMNFDLKQGTWGGDWPEALAISQRWQQQDKAANKELTFLLFSCPHRLREHLERGRGNLEWKEPPSMRLKARPSSPGFSVLTCSAFSFYPPELQLRFLRNGLAAGTGQGDFGPNSDGSFHASSSLTVKSGDEHHYCCIVQHAGLAQPLRVELESPAKSS

SEQ ID NO: 21 - protein, 8 aa, synthetic construct
GGHHHHHH

SEQ ID NO: 22 - protein, 15 aa, synthetic construct
GGGGSGGGGSGGGGS

SEQ ID NO: 23 - protein, 192 aa, synthetic construct
GMRTEDLPKAVVFLEPQWYRVLEKDSVTLKCQGAYSPEDNSTQWFHNESLISSQASSYFIDAATVDDSGEYRCQTNLSTLSDPVQLEVHIGWLLLQAPRWVFKEEDPIHLRCHSWKNTALHKVTYLQNGKGRKYFHHNSDFYIPKATLKDSGSYFCRGLVGSKNVSSETVNITITQGLAVPTISSFFPPGYQ

SEQ ID NO: 24 - protein, 122 aa, synthetic construct
EVQLVESGGGLVQPGGSLRLSCAASGYSFTGYTMNWVRQAPGKGLEWVALINPTKGVSTYNQKFKDRFTISVDKSKNTAYLQMNSLRAEDTAVYYCARSGYYGDSDWYFDVWGQGTLVTVSS

SEQ ID NO: 25 - protein, 107 aa, synthetic construct [sequence omitted]

SEQ ID NO: 26 - protein, 244 aa, synthetic construct
DIQMTQSPSSLSASVGDRVTITCRASQDIRNYLNWYQQKPGKAPKLLIYYTSRLESGVPSRFSGSGSGTDYTLTISSLQPEDFATYYCQQGNTLPWTFGQGTKVEIKGGGGSGGGGSGGGGSEVQLVESGGGLVQPGGSLRLSCAASGYSFTGYTMNWVRQAPGKGLEWVALINPTKGVSTYNQKFKDRFTISVDKSKNTAYLQMNSLRAEDTAVYYCARSGYYGDSDWYFDVWGQGTLVTVSS

SEQ ID NO: 27 - protein, 451 aa, synthetic construct
GMRTEDLPKAVVFLEPQWYRVLEKDSVTLKCQGAYSPEDNSTQWFHNESLISSQASSYFIDAATVDDSGEYRCQTNLSTLSDPVQLEVHIGWLLLQAPRWVFKEEDPIHLRCHSWKNTALHKVTYLQNGKGRKYFHHNSDFYIPKATLKDSGSYFCRGLVGSKNVSSETVNITITQGLAVPTISSFFPPGYQGGGGSGGGGSGGGGSDIQMTQSPSSLSASVGDRVTITCRASQDIRNYLNWYQQKPGKAPKLLIYYTSRLESGVPSRFSGSGSGTDYTLTISSLQPEDFATYYCQQGNTLPWTFGQGTKVEIKGGGGSGGGGSGGGGSEVQLVESGGGLVQPGGSLRLSCAASGYSFTGYTMNWVRQAPGKGLEWVALINPTKGVSTYNQKFKDRFTISVDKSKNTAYLQMNSLRAEDTAVYYCARSGYYGDSDWYFDVWGQGTLVTVSS

SEQ ID NO: 28 - protein, 459 aa, synthetic construct
GMRTEDLPKAVVFLEPQWYRVLEKDSVTLKCQGAYSPEDNSTQWFHNESLISSQASSYFIDAATVDDSGEYRCQTNLSTLSDPVQLEVHIGWLLLQAPRWVFKEEDPIHLRCHSWKNTALHKVTYLQNGKGRKYFHHNSDFYIPKATLKDSGSYFCRGLVGSKNVSSETVNITITQGLAVPTISSFFPPGYQGGGGSGGGGSGGGGSDIQMTQSPSSLSASVGDRVTITCRASQDIRNYLNWYQQKPGKAPKLLIYYTSRLESGVPSRFSGSGSGTDYTLTISSLQPEDFATYYCQQGNTLPWTFGQGTKVEIKGGGGSGGGGSGGGGSEVQLVESGGGLVQPGGSLRLSCAASGYSFTGYTMNWVRQAPGKGLEWVALINPTKGVSTYNQKFKDRFTISVDKSKNTAYLQMNSLRAEDTAVYYCARSGYYGDSDWYFDVWGQGTLVTVSSGGHHHHHH

SEQ ID NO: 29 - protein, 119 aa, synthetic construct
QVQLQQSGAELARPGASVKMSCKTSGYTFTRYTMHWVKQRPGQGLEWIGYINPSRGYTNYNQKFKDKATLTTDKSSSTAYMQLSSLTSEDSAVYYCARYYDDHYSLDYWGQGTTLTVSS

SEQ ID NO: 30 - protein, 106 aa, synthetic construct
QIVLTQSPSSLSASLGEKVTMTCRASSSVSYMNWYQQKPGTSPKRWIYDTSKVASGVPDRFSGSGSGTSYSLTISSMEAEDAATYYCQQWSSNPLTFGAGTKLELK

SEQ ID NO: 31 - protein, 240 aa, synthetic construct
QVQLQQSGAELARPGASVKMSCKTSGYTFTRYTMHWVKQRPGQGLEWIGYINPSRGYTNYNQKFKDKATLTTDKSSSTAYMQLSSLTSEDSAVYYCARYYDDHYSLDYWGQGTTLTVSSGGGGSGGGGSGGGGSQIVLTQSPSSLSASLGEKVTMTCRASSSVSYMNWYQQKPGTSPKRWIYDTSKVASGVPDRFSGSGSGTSYSLTISSMEAEDAATYYCQQWSSNPLTFGAGTKLELK

SEQ ID NO: 32 - protein, 447 aa, synthetic construct
GMRTEDLPKAVVFLEPQWYRVLEKDSVTLKCQGAYSPEDNSTQWFHNESLISSQASSYFIDAATVDDSGEYRCQTNLSTLSDPVQLEVHIGWLLLQAPRWVFKEEDPIHLRCHSWKNTALHKVTYLQNGKGRKYFHHNSDFYIPKATLKDSGSYFCRGLVGSKNVSSETVNITITQGLAVPTISSFFPPGYQGGGGSGGGGSGGGGSQVQLQQSGAELARPGASVKMSCKTSGYTFTRYTMHWVKQRPGQGLEWIGYINPSRGYTNYNQKFKDKATLTTDKSSSTAYMQLSSLTSEDSAVYYCARYYDDHYSLDYWGQGTTLTVSSGGGGSGGGGSGGGGSQIVLTQSPSSLSASLGEKVTMTCRASSSVSYMNWYQQKPGTSPKRWIYDTSKVASGVPDRFSGSGSGTSYSLTISSMEAEDAATYYCQQWSSNPLTFGAGTKLELK

SEQ ID NO: 33 - protein, 455 aa, synthetic construct
GMRTEDLPKAVVFLEPQWYRVLEKDSVTLKCQGAYSPEDNSTQWFHNESLISSQASSYFIDAATVDDSGEYRCQTNLSTLSDPVQLEVHIGWLLLQAPRWVFKEEDPIHLRCHSWKNTALHKVTYLQNGKGRKYFHHNSDFYIPKATLKDSGSYFCRGLVGSKNVSSETVNITITQGLAVPTISSFFPPGYQGGGGSGGGGSGGGGSQVQLQQSGAELARPGASVKMSCKTSGYTFTRYTMHWVKQRPGQGLEWIGYINPSRGYTNYNQKFKDKATLTTDKSSSTAYMQLSSLTSEDSAVYYCARYYDDHYSLDYWGQGTTLTVSSGGGGSGGGGSGGGGSQIVLTQSPSSLSASLGEKVTMTCRASSSVSYMNWYQQKPGTSPKRWIYDTSKVASGVPDRFSGSGSGTSYSLTISSMEAEDAATYYCQQWSSNPLTFGAGTKLELKGGHHHHHH

SEQ ID NO: 34 - protein, 117 aa, synthetic construct
EVQLVESGGGVVQPGGSLRLSCVASGYVHKINFYGWYRQAPGKEREKVAHISIGDQTDYADSAKGRFTISRDESKNTVYLQMNSLRPEDTAAYYCRALSRIWPYDYWGQGTLVTVSS

SEQ ID NO: 35 - protein, 324 aa, synthetic construct
GMRTEDLPKAVVFLEPQWYRVLEKDSVTLKCQGAYSPEDNSTQWFHNESLISSQASSYFIDAATVDDSGEYRCQTNLSTLSDPVQLEVHIGWLLLQAPRWVFKEEDPIHLRCHSWKNTALHKVTYLQNGKGRKYFHHNSDFYIPKATLKDSGSYFCRGLVGSKNVSSETVNITITQGLAVPTISSFFPPGYQGGGGSGGGGSGGGGSEVQLVESGGGVVQPGGSLRLSCVASGYVHKINFYGWYRQAPGKEREKVAHISIGDQTDYADSAKGRFTISRDESKNTVYLQMNSLRPEDTAAYYCRALSRIWPYDYWGQGTLVTVSS

SEQ ID NO: 36 - protein, 332 aa, synthetic construct
GMRTEDLPKAVVFLEPQWYRVLEKDSVTLKCQGAYSPEDNSTQWFHNESLISSQASSYFIDAATVDDSGEYRCQTNLSTLSDPVQLEVHIGWLLLQAPRWVFKEEDPIHLRCHSWKNTALHKVTYLQNGKGRKYFHHNSDFYIPKATLKDSGSYFCRGLVGSKNVSSETVNITITQGLAVPTISSFFPPGYQGGGGSGGGGSGGGGSEVQLVESGGGVVQPGGSLRLSCVASGYVHKINFYGWYRQAPGKEREKVAHISIGDQTDYADSAKGRFTISRDESKNTVYLQMNSLRPEDTAAYYCRALSRIWPYDYWGQGTLVTVSSGGHHHHHH

SEQ ID NO: 37 - protein, 115 aa, synthetic construct [sequence omitted]

SEQ ID NO: 38 - protein, 581 aa, synthetic construct
EVQLVESGGGLVQPGNSLRLSCAASGFTFSSFGMSWVRQAPGKGLEWVSSISGSGSDTLYADSVKGRFTISRDNAKTTLYLQMNSLRPEDTAVYYCTIGGSLSRSSQGTLVTVSSGGGGSGGGGSGGGGSGMRTEDLPKAVVFLEPQWYRVLEKDSVTLKCQGAYSPEDNSTQWFHNESLISSQASSYFIDAATVDDSGEYRCQTNLSTLSDPVQLEVHIGWLLLQAPRWVFKEEDPIHLRCHSWKNTALHKVTYLQNGKGRKYFHHNSDFYIPKATLKDSGSYFCRGLVGSKNVSSETVNITITQGLAVPTISSFFPPGYQGGGGSGGGGSGGGGSDIQMTQSPSSLSASVGDRVTITCRASQDIRNYLNWYQQKPGKAPKLLIYYTSRLESGVPSRFSGSGSGTDYTLTISSLQPEDFATYYCQQGNTLPWTFGQGTKVEIKGGGGSGGGGSGGGGSEVQLVESGGGLVQPGGSLRLSCAASGYSFTGYTMNWVRQAPGKGLEWVALINPTKGVSTYNQKFKDRFTISVDKSKNTAYLQMNSLRAEDTAVYYCARSGYYGDSDWYFDVWGQGTLVTVSS

SEQ ID NO: 39 - protein, 589 aa, synthetic construct
EVQLVESGGGLVQPGNSLRLSCAASGFTFSSFGMSWVRQAPGKGLEWVSSISGSGSDTLYADSVKGRFTISRDNAKTTLYLQMNSLRPEDTAVYYCTIGGSLSRSSQGTLVTVSSGGGGSGGGGSGGGGSGMRTEDLPKAVVFLEPQWYRVLEKDSVTLKCQGAYSPEDNSTQWFHNESLISSQASSYFIDAATVDDSGEYRCQTNLSTLSDPVQLEVHIGWLLLQAPRWVFKEEDPIHLRCHSWKNTALHKVTYLQNGKGRKYFHHNSDFYIPKATLKDSGSYFCRGLVGSKNVSSETVNITITQGLAVPTISSFFPPGYQGGGGSGGGGSGGGGSDIQMTQSPSSLSASVGDRVTITCRASQDIRNYLNWYQQKPGKAPKLLIYYTSRLESGVPSRFSGSGSGTDYTLTISSLQPEDFATYYCQQGNTLPWTFGQGTKVEIKGGGGSGGGGSGGGGSEVQLVESGGGLVQPGGSLRLSCAASGYSFTGYTMNWVRQAPGKGLEWVALINPTKGVSTYNQKFKDRFTISVDKSKNTAYLQMNSLRAEDTAVYYCARSGYYGDSDWYFDVWGQGTLVTVSSGGHHHHHH

SEQ ID NO: 40 - protein, 232 aa, synthetic construct
EPKSSDKTHTCPPCPAPEAAGGPSVFLFPPKPKDTLMISRTPEVTCVVVDVSHEDPEVKFNWYVDGVEVHNAKTKPREEQYNSTYRVVSVLTVLHQDWLNGKEYKCKVSNKALAAPIEKTISKAKGQPREPQVYTLPPSRDELTKNQVSLSCAVKGFYPSDIAVEWESNGQPENNYKTTPPVLDSDGSFFLVSKLTVDKSRWQQGNVFSCSVMHEALHNHYTQKSLSLSPGK

SEQ ID NO: 41 - protein, 439 aa, synthetic construct
GMRTEDLPKAVVFLEPQWYRVLEKDSVTLKCQGAYSPEDNSTQWFHNESLISSQASSYFIDAATVDDSGEYRCQTNLSTLSDPVQLEVHIGWLLLQAPRWVFKEEDPIHLRCHSWKNTALHKVTYLQNGKGRKYFHHNSDFYIPKATLKDSGSYFCRGLVGSKNVSSETVNITITQGLAVPTISSFFPPGYQGGGGSGGGGSGGGGSEPKSSDKTHTCPPCPAPEAAGGPSVFLFPPKPKDTLMISRTPEVTCVVVDVSHEDPEVKFNWYVDGVEVHNAKTKPREEQYNSTYRVVSVLTVLHQDWLNGKEYKCKVSNKALAAPIEKTISKAKGQPREPQVYTLPPSRDELTKNQVSLSCAVKGFYPSDIAVEWESNGQPENNYKTTPPVLDSDGSFFLVSKLTVDKSRWQQGNVFSCSVMHEALHNHYTQKSLSLSPGK

SEQ ID NO: 42 - protein, 125 aa, synthetic construct
EVQLVESGGGLVQPGGSLKLSCAASGFTFNKYAMNWVRQAPGKGLEWVARIRSKYNNYATYYADSVKDRFTISRDDSKNTAYLQMNNLKTEDTAVYYCVRHGNFGNSYISYWAYWGQGTLVTVSS

SEQ ID NO: 43 - protein, 330 aa, synthetic construct
ASTKGPSVFPLAPSSKSTSGGTAALGCLVKDYFPEPVTVSWNSGALTSGVHTFPAVLQSSGLYSLSSVVTVPSSSLGTQTYICNVNHKPSNTKVDKKVEPKSCDKTHTCPPCPAPEAAGGPSVFLFPPKPKDTLMISRTPEVTCVVVDVSHEDPEVKFNWYVDGVEVHNAKTKPREEQYNSTYRVVSVLTVLHQDWLNGKEYKCKVSNKALAAPIEKTISKAKGQPREPQVYTLPPSRDELTKNQVSLWCLVKGFYPSDIAVEWESNGQPENNYKTTPPVLDSDGSFFLYSKLTVDKSRWQQGNVFSCSVMHEALHNHYTQKSLSLSPGK

SEQ ID NO: 44 - protein, 455 aa, synthetic construct
EVQLVESGGGLVQPGGSLKLSCAASGFTFNKYAMNWVRQAPGKGLEWVARIRSKYNNYATYYADSVKDRFTISRDDSKNTAYLQMNNLKTEDTAVYYCVRHGNFGNSYISYWAYWGQGTLVTVSSASTKGPSVFPLAPSSKSTSGGTAALGCLVKDYFPEPVTVSWNSGALTSGVHTFPAVLQSSGLYSLSSVVTVPSSSLGTQTYICNVNHKPSNTKVDKKVEPKSCDKTHTCPPCPAPEAAGGPSVFLFPPKPKDTLMISRTPEVTCVVVDVSHEDPEVKFNWYVDGVEVHNAKTKPREEQYNSTYRVVSVLTVLHQDWLNGKEYKCKVSNKALAAPIEKTISKAKGQPREPQVYTLPPSRDELTKNQVSLWCLVKGFYPSDIAVEWESNGQPENNYKTTPPVLDSDGSFFLYSKLTVDKSRWQQGNVFSCSVMHEALHNHYTQKSLSLSPGK

SEQ ID NO: 45 - protein, 109 aa, synthetic construct
QTVVTQEPSLTVSPGGTVTLTCGSSTGAVTSGNYPNWVQQKPGQAPRGLIGGTKFLAPGTPARFSGSLLGGKAALTLSGVQPEDEAEYYCVLWYSNRWVFGGGTKLTVL

SEQ ID NO: 46 - protein, 106 aa, synthetic construct
SQPKAAPSVTLFPPSSEELQANKATLVCLVSDFYPGAVTVAWKADGSPVKVGVETTKPSKQSNNKYAASSYLSLTPEQWKSHRSYSCRVTHEGSTVEKTVAPAECS

SEQ ID NO: 47 - protein, 215 aa, synthetic construct
QTVVTQEPSLTVSPGGTVTLTCGSSTGAVTSGNYPNWVQQKPGQAPRGLIGGTKFLAPGTPARFSGSLLGGKAALTLSGVQPEDEAEYYCVLWYSNRWVFGGGTKLTVLSQPKAAPSVTLFPPSSEELQANKATLVCLVSDFYPGAVTVAWKADGSPVKVGVETTKPSKQSNNKYAASSYLSLTPEQWKSHRSYSCRVTHEGSTVEKTVAPAECS

SEQ ID NO: 48 - protein, 121 aa, synthetic construct
QVQLQESGGGLVQAGDSLRISCRASGLTVNDLYMGWFRQAPGKEREFVGRVTPGDNTDYTYYVDSVKGRFTISRDSAKNTVYLQMNSLKLEDTAVYLCAGRRFGSSEWDYWGQGTQVTVSS

SEQ ID NO: 49 - protein, 380 aa, synthetic construct
QVQLQESGGGLVQAGDSLRISCRASGLTVNDLYMGWFRQAPGKEREFVGRVTPGDNTDYTYYVDSVKGRFTISRDSAKNTVYLQMNSLKLEDTAVYLCAGRRFGSSEWDYWGQGTQVTVSSGGGGSGGGGSGGGGSDIQMTQSPSSLSASVGDRVTITCRASQDIRNYLNWYQQKPGKAPKLLIYYTSRLESGVPSRFSGSGSGTDYTLTISSLQPEDFATYYCQQGNTLPWTFGQGTKVEIKGGGGSGGGGSGGGGSEVQLVESGGGLVQPGGSLRLSCAASGYSFTGYTMNWVRQAPGKGLEWVALINPTKGVSTYNQKFKDRFTISVDKSKNTAYLQMNSLRAEDTAVYYCARSGYYGDSDWYFDVWGQGTLVTVSS

SEQ ID NO: 50 - protein, 388 aa, synthetic construct
QVQLQESGGGLVQAGDSLRISCRASGLTVNDLYMGWFRQAPGKEREFVGRVTPGDNTDYTYYVDSVKGRFTISRDSAKNTVYLQMNSLKLEDTAVYLCAGRRFGSSEWDYWGQGTQVTVSSGGGGSGGGGSGGGGSDIQMTQSPSSLSASVGDRVTITCRASQDIRNYLNWYQQKPGKAPKLLIYYTSRLESGVPSRFSGSGSGTDYTLTISSLQPEDFATYYCQQGNTLPWTFGQGTKVEIKGGGGSGGGGSGGGGSEVQLVESGGGLVQPGGSLRLSCAASGYSFTGYTMNWVRQAPGKGLEWVALINPTKGVSTYNQKFKDRFTISVDKSKNTAYLQMNSLRAEDTAVYYCARSGYYGDSDWYFDVWGQGTLVTVSSGGHHHHHH

SEQ ID NO: 51 - protein, 116 aa, synthetic construct
EVQLVESGGGLVQPGKSLKLSCEASGFTFSGYGMHWVRQAPGRGLESVAYITSSSINIKYADAVKGRFTVSRDNAKNLLFLQMNILKSEDTAMYYCARFDWDKNYWGQGTMVTVSS

SEQ ID NO: 52 - protein, 107 aa, synthetic construct
DIQMTQSPSSLPASLGDRVTINCQASQDISNYLNWYQQKPGKAPKLLIYYTNKLADGVPSRFSGSGSGRDSSFTISSLESEDIGSYYCQQYYNYPWTFGPGTKLEIK

SEQ ID NO: 53 - protein, 243 aa, synthetic construct
EVQLVESGGGLVQPGKSLKLSCEASGFTFSGYGMHWVRQAPGRGLESVAYITSSSINIKYADAVKGRFTVSRDNAKNLLFLQMNILKSEDTAMYYCARFDWDKNYWGQGTMVTVSSGGGGSGGGGSGGGGSGGGGSDIQMTQSPSSLPASLGDRVTINCQASQDISNYLNWYQQKPGKAPKLLIYYTNKLADGVPSRFSGSGSGRDSSFTISSLESEDIGSYYCQQYYNYPWTFGPGTKLEIK

SEQ ID NO: 54 - protein, 441 aa, synthetic construct
GLQKAVVNLDPKWVRVLEEDSVTLRCQGTFSPEDNSIKWFHNESLIPHQDANYVIQSARVKDSGMYRCQTALSTISDPVQLEVHMGWLLLQTTKWLFQEGDPIHLRCHSWQNRPVRKVTYLQNGKGKKYFHENSELLIPKATHNDSGSYFCRGLIGHNNKSSASFRISLGDPGSPSMFPPWHQGGGGSGGGGSGGGGSEVQLVESGGGLVQPGKSLKLSCEASGFTFSGYGMHWVRQAPGRGLESVAYITSSSINIKYADAVKGRFTVSRDNAKNLLFLQMNILKSEDTAMYYCARFDWDKNYWGQGTMVTVSSGGGGSGGGGSGGGGSGGGGSDIQMTQSPSSLPASLGDRVTINCQASQDISNYLNWYQQKPGKAPKLLIYYTNKLADGVPSRFSGSGSGRDSSFTISSLESEDIGSYYCQQYYNYPWTFGPGTKLEIK

SEQ ID NO: 55 - protein, 449 aa, synthetic construct
GLQKAVVNLDPKWVRVLEEDSVTLRCQGTFSPEDNSIKWFHNESLIPHQDANYVIQSARVKDSGMYRCQTALSTISDPVQLEVHMGWLLLQTTKWLFQEGDPIHLRCHSWQNRPVRKVTYLQNGKGKKYFHENSELLIPKATHNDSGSYFCRGLIGHNNKSSASFRISLGDPGSPSMFPPWHQGGGGSGGGGSGGGGSEVQLVESGGGLVQPGKSLKLSCEASGFTFSGYGMHWVRQAPGRGLESVAYITSSSINIKYADAVKGRFTVSRDNAKNLLFLQMNILKSEDTAMYYCARFDWDKNYWGQGTMVTVSSGGGGSGGGGSGGGGSGGGGSDIQMTQSPSSLPASLGDRVTINCQASQDISNYLNWYQQKPGKAPKLLIYYTNKLADGVPSRFSGSGSGRDSSFTISSLESEDIGSYYCQQYYNYPWTFGPGTKLEIKGGHHHHHH

SEQ ID NO: 56 - protein, 119 aa, synthetic construct
EVYLVESGGGLVQPGGSVKLSCSASGFTFSTFPMAWVRQAPTQGLQWVATLSPSGDSTYYRDSVKGRFTISRDNVLNTLYLHMDILRSEDTATYYCTKVGFTTFYFDSWGQGVMVAVSS

SEQ ID NO: 57 - protein, 106 aa, synthetic construct
DIQMTQSPSFLSASVGDRVTINCKASQNINKYLDWYQQKFGETPKLLIYNINNLHSGVPSRFSGSGSGPDFTLTISSLQPEDVATYFCLQHRTGWTFGGGTKVELR

SEQ ID NO: 58 - protein, 245 aa, synthetic construct
EVYLVESGGGLVQPGGSVKLSCSASGFTFSTFPMAWVRQAPTQGLQWVATLSPSGDSTYYRDSVKGRFTISRDNVLNTLYLHMDILRSEDTATYYCTKVGFTTFYFDSWGQGVMVAVSSGGGGSGGGGSGGGGSGGGGSDIQMTQSPSFLSASVGDRVTINCKASQNINKYLDWYQQKFGETPKLLIYNINNLHSGVPSRFSGSGSGPDFTLTISSLQPEDVATYFCLQHRTGWTFGGGTKVELR

SEQ ID NO: 59 - protein, 443 aa, synthetic construct
GLQKAVVNLDPKWVRVLEEDSVTLRCQGTFSPEDNSIKWFHNESLIPHQDANYVIQSARVKDSGMYRCQTALSTISDPVQLEVHMGWLLLQTTKWLFQEGDPIHLRCHSWQNRPVRKVTYLQNGKGKKYFHENSELLIPKATHNDSGSYFCRGLIGHNNKSSASFRISLGDPGSPSMFPPWHQGGGGSGGGGSGGGGSEVYLVESGGGLVQPGGSVKLSCSASGFTFSTFPMAWVRQAPTQGLQWVATLSPSGDSTYYRDSVKGRFTISRDNVLNTLYLHMDILRSEDTATYYCTKVGFTTFYFDSWGQGVMVAVSSGGGGSGGGGSGGGGSGGGGSDIQMTQSPSFLSASVGDRVTINCKASQNINKYLDWYQQKFGETPKLLIYNINNLHSGVPSRFSGSGSGPDFTLTISSLQPEDVATYFCLQHRTGWTFGGGTKVELR

SEQ ID NO: 60 - protein, 451 aa, synthetic construct
GLQKAVVNLDPKWVRVLEEDSVTLRCQGTFSPEDNSIKWFHNESLIPHQDANYVIQSARVKDSGMYRCQTALSTISDPVQLEVHMGWLLLQTTKWLFQEGDPIHLRCHSWQNRPVRKVTYLQNGKGKKYFHENSELLIPKATHNDSGSYFCRGLIGHNNKSSASFRISLGDPGSPSMFPPWHQGGGGSGGGGSGGGGSEVYLVESGGGLVQPGGSVKLSCSASGFTFSTFPMAWVRQAPTQGLQWVATLSPSGDSTYYRDSVKGRFTISRDNVLNTLYLHMDILRSEDTATYYCTKVGFTTFYFDSWGQGVMVAVSSGGGGSGGGGSGGGGSGGGGSDIQMTQSPSFLSASVGDRVTINCKASQNINKYLDWYQQKFGETPKLLIYNINNLHSGVPSRFSGSGSGPDFTLTISSLQPEDVATYFCLQHRTGWTFGGGTKVELRGGHHHHHH

SEQ ID NO: 61 - protein, 120 aa, synthetic construct
QVKLQQSGSELGKPGASVKLSCKTSGYIFTDHYISWVKQKPGESLQWIGNVYGGNGGTSYNQKFQGKATLTVDKISSTAYMELSSLTSEDSAIYYCARRPVATGHAMDYWGQGIQVTVSS

SEQ ID NO: 62 - protein, 107 aa, synthetic construct
DIVLTQTPATLSLIPGERVTMTCKTSQNIGTILHWYHQKPKEAPRALIKYASQSIPGIPSRFSGSGSETDFTLSINNLEPDDIGIYYCQQSRSWPVTFGPGTKLEIK

SEQ ID NO: 63 - protein, 247 aa, synthetic construct
QVKLQQSGSELGKPGASVKLSCKTSGYIFTDHYISWVKQKPGESLQWIGNVYGGNGGTSYNQKFQGKATLTVDKISSTAYMELSSLTSEDSAIYYCARRPVATGHAMDYWGQGIQVTVSSGGGGSGGGGSGGGGSGGGGSDIVLTQTPATLSLIPGERVTMTCKTSQNIGTILHWYHQKPKEAPRALIKYASQSIPGIPSRFSGSGSETDFTLSINNLEPDDIGIYYCQQSRSWPVTFGPGTKLEIK

SEQ ID NO: 64 - protein, 445 aa, synthetic construct
GLQKAVVNLDPKWVRVLEEDSVTLRCQGTFSPEDNSIKWFHNESLIPHQDANYVIQSARVKDSGMYRCQTALSTISDPVQLEVHMGWLLLQTTKWLFQEGDPIHLRCHSWQNRPVRKVTYLQNGKGKKYFHENSELLIPKATHNDSGSYFCRGLIGHNNKSSASFRISLGDPGSPSMFPPWHQGGGGSGGGGSGGGGSQVKLQQSGSELGKPGASVKLSCKTSGYIFTDHYISWVKQKPGESLQWIGNVYGGNGGTSYNQKFQGKATLTVDKISSTAYMELSSLTSEDSAIYYCARRPVATGHAMDYWGQGIQVTVSSGGGGSGGGGSGGGGSGGGGSDIVLTQTPATLSLIPGERVTMTCKTSQNIGTILHWYHQKPKEAPRALIKYASQSIPGIPSRFSGSGSETDFTLSINNLEPDDIGIYYCQQSRSWPVTFGPGTKLEIK

SEQ ID NO: 65 - protein, 453 aa, synthetic construct
GLQKAVVNLDPKWVRVLEEDSVTLRCQGTFSPEDNSIKWFHNESLIPHQDANYVIQSARVKDSGMYRCQTALSTISDPVQLEVHMGWLLLQTTKWLFQEGDPIHLRCHSWQNRPVRKVTYLQNGKGKKYFHENSELLIPKATHNDSGSYFCRGLIGHNNKSSASFRISLGDPGSPSMFPPWHQGGGGSGGGGSGGGGSQVKLQQSGSELGKPGASVKLSCKTSGYIFTDHYISWVKQKPGESLQWIGNVYGGNGGTSYNQKFQGKATLTVDKISSTAYMELSSLTSEDSAIYYCARRPVATGHAMDYWGQGIQVTVSSGGGGSGGGGSGGGGSGGGGSDIVLTQTPATLSLIPGERVTMTCKTSQNIGTILHWYHQKPKEAPRALIKYASQSIPGIPSRFSGSGSETDFTLSINNLEPDDIGIYYCQQSRSWPVTFGPGTKLEIKGGHHHHHH

SEQ ID NO: 66 - protein, 115 aa, synthetic construct
QVQLQESGGGLVQPGGSLRLSCEASGFTFSRFGMTWVRQAPGKGVEWVSGISSLGDSTLYADSVKGRFTISRDNAKNTLYLQMNSLKPEDTAVYYCTIGGSLNPGGQGTQVTVSS

SEQ ID NO: 67 - protein, 575 aa, synthetic construct
QVQLQESGGGLVQPGGSLRLSCEASGFTFSRFGMTWVRQAPGKGVEWVSGISSLGDSTLYADSVKGRFTISRDNAKNTLYLQMNSLKPEDTAVYYCTIGGSLNPGGQGTQVTVSSGGGGSGGGGSGGGGSGLQKAVVNLDPKWVRVLEEDSVTLRCQGTFSPEDNSIKWFHNESLIPHQDANYVIQSARVKDSGMYRCQTALSTISDPVQLEVHMGWLLLQTTKWLFQEGDPIHLRCHSWQNRPVRKVTYLQNGKGKKYFHENSELLIPKATHNDSGSYFCRGLIGHNNKSSASFRISLGDPGSPSMFPPWHQGGGGSGGGGSGGGGSQVKLQQSGSELGKPGASVKLSCKTSGYIFTDHYISWVKQKPGESLQWIGNVYGGNGGTSYNQKFQGKATLTVDKISSTAYMELSSLTSEDSAIYYCARRPVATGHAMDYWGQGIQVTVSSGGGGSGGGGSGGGGSGGGGSDIVLTQTPATLSLIPGERVTMTCKTSQNIGTILHWYHQKPKEAPRALIKYASQSIPGIPSRFSGSGSETDFTLSINNLEPDDIGIYYCQQSRSWPVTFGPGTKLEIK

SEQ ID NO: 68 - protein, 583 aa, synthetic construct
QVQLQESGGGLVQPGGSLRLSCEASGFTFSRFGMTWVRQAPGKGVEWVSGISSLGDSTLYADSVKGRFTISRDNAKNTLYLQMNSLKPEDTAVYYCTIGGSLNPGGQGTQVTVSSGGGGSGGGGSGGGGSGLQKAVVNLDPKWVRVLEEDSVTLRCQGTFSPEDNSIKWFHNESLIPHQDANYVIQSARVKDSGMYRCQTALSTISDPVQLEVHMGWLLLQTTKWLFQEGDPIHLRCHSWQNRPVRKVTYLQNGKGKKYFHENSELLIPKATHNDSGSYFCRGLIGHNNKSSASFRISLGDPGSPSMFPPWHQGGGGSGGGGSGGGGSQVKLQQSGSELGKPGASVKLSCKTSGYIFTDHYISWVKQKPGESLQWIGNVYGGNGGTSYNQKFQGKATLTVDKISSTAYMELSSLTSEDSAIYYCARRPVATGHAMDYWGQGIQVTVSSGGGGSGGGGSGGGGSGGGGSDIVLTQTPATLSLIPGERVTMTCKTSQNIGTILHWYHQKPKEAPRALIKYASQSIPGIPSRFSGSGSETDFTLSINNLEPDDIGIYYCQQSRSWPVTFGPGTKLEIKGGHHHHHH

SEQ ID NO: 69 - protein, 242 aa, synthetic construct
IEPRGPTIKPCPPCKCPAPNAAGGPSVFIFPPKIKDVLMISLSPIVTCVVVDVSEDDPDVQISWFVNNVEVHTAQTQTHREDYNSTLRVVSALPIQHQDWMSGKEFKCKVNNKDLGAPIERTISKPKGSVRAPQVYVLPPPEKEMTKKQVSLTCLVKDFMPEDIYVEWTNNGKTELNYKNTEPVLKSDGSYFMYSKLTVEKKNWVERNSYSCSVVHEGLHNHHTTKSFSRTPGKGGHHHHHH

SEQ ID NO: 70 - protein, 440 aa, synthetic construct
GLQKAVVNLDPKWVRVLEEDSVTLRCQGTFSPEDNSIKWFHNESLIPHQDANYVIQSARVKDSGMYRCQTALSTISDPVQLEVHMGWLLLQTTKWLFQEGDPIHLRCHSWQNRPVRKVTYLQNGKGKKYFHENSELLIPKATHNDSGSYFCRGLIGHNNKSSASFRISLGDPGSPSMFPPWHQGGGGSGGGGSGGGGSIEPRGPTIKPCPPCKCPAPNAAGGPSVFIFPPKIKDVLMISLSPIVTCVVVDVSEDDPDVQISWFVNNVEVHTAQTQTHREDYNSTLRVVSALPIQHQDWMSGKEFKCKVNNKDLGAPIERTISKPKGSVRAPQVYVLPPPEKEMTKKQVSLTCLVKDFMPEDIYVEWTNNGKTELNYKNTEPVLKSDGSYFMYSKLTVEKKNWVERNSYSCSVVHEGLHNHHTTKSFSRTPGKGGHHHHHH

SEQ ID NO: 71 - protein, 330 aa, synthetic construct
AKTTAPSVYPLAPVCGDTTGSSVTLGCLVKGYFPEPVTLTWNSGSLSSGVHTFPAVLQSDLYTLSSSVTVTSSTWPSQSITCNVAHPASSTKVDKKIEPRGPTIKPCPPCKCPAPNAAGGPSVFIFPPKIKDVLMISLSPIVTCVVVDVSEDDPDVQISWFVNNVEVHTAQTQTHREDYNSTLRVVSALPIQHQDWMSGKEFKCKVNNKDLGAPIERTISKPKGSVRAPQVYVLPPPEEEMTKKQVSLTCLVKDFMPEDIYVEWTNNGKTELNYKNTEPVLDSDGSYFMYSDLTVEKKNWVERNSYSCSVVHEGLHNHHTTDSFSRTPGK

SEQ ID NO: 72 - protein, 450 aa, synthetic construct
QVKLQQSGSELGKPGASVKLSCKTSGYIFTDHYISWVKQKPGESLQWIGNVYGGNGGTSYNQKFQGKATLTVDKISSTAYMELSSLTSEDSAIYYCARRPVATGHAMDYWGQGIQVTVSSAKTTAPSVYPLAPVCGDTTGSSVTLGCLVKGYFPEPVTLTWNSGSLSSGVHTFPAVLQSDLYTLSSSVTVTSSTWPSQSITCNVAHPASSTKVDKKIEPRGPTIKPCPPCKCPAPNAAGGPSVFIFPPKIKDVLMISLSPIVTCVVVDVSEDDPDVQISWFVNNVEVHTAQTQTHREDYNSTLRVVSALPIQHQDWMSGKEFKCKVNNKDLGAPIERTISKPKGSVRAPQVYVLPPPEEEMTKKQVSLTCLVKDFMPEDIYVEWTNNGKTELNYKNTEPVLDSDGSYFMYSDLTVEKKNWVERNSYSCSVVHEGLHNHHTTDSFSRTPGK

SEQ ID NO: 73 - protein, 107 aa, synthetic construct
RADAAPTVSIFPPSSEQLTSGGASVVCFLNNFYPKDINVKWKIDGSERQNGVLNSWTDQDSKDSTYSMSSTLTLTKDEYERHNSYTCEATHKTSTSPIVKSFNRNEC

SEQ ID NO: 74 - protein, 214 aa, synthetic construct
DIVLTQTPATLSLIPGERVTMTCKTSQNIGTILHWYHQKPKEAPRALIKYASQSIPGIPSRFSGSGSETDFTLSINNLEPDDIGIYYCQQSRSWPVTFGPGTKLEIKRADAAPTVSIFPPSSEQLTSGGASVVCFLNNFYPKDINVKWKIDGSERQNGVLNSWTDQDSKDSTYSMSSTLTLTKDEYERHNSYTCEATHKTSTSPIVKSFNRNEC

SEQ ID NO: 75 - protein, 436 aa, synthetic construct
GMRTEDLPKAVVFLEPQWYRVLEKDSVTLKCQGAYSPEDNSTQWFHNESLISSQASSYFIDAATVDDSGEYRCQTNLSTLSDPVQLEVHIGWLLLQAPRWVFKEEDPIHLRCHSWKNTALHKVTYLQNGKGRKYFHHNSDFYIPKATLKDSGSYFCRGLVGSKNVSSETVNITITQGGGGGSGGGGSGGGGSDIQMTQSPSSLSASVGDRVTITCRASQDIRNYLNWYQQKPGKAPKLLIYYTSRLESGVPSRFSGSGSGTDYTLTISSLQPEDFATYYCQQGNTLPWTFGQGTKVEIKGGGGSGGGGSGGGGSEVQLVESGGGLVQPGGSLRLSCAASGYSFTGYTMNWVRQAPGKGLEWVALINPTKGVSTYNQKFKDRFTISVDKSKNTAYLQMNSLRAEDTAVYYCARSGYYGDSDWYFDVWGQGTLVTVSS

SEQ ID NO: 76 - protein, 444 aa, synthetic construct
GMRTEDLPKAVVFLEPQWYRVLEKDSVTLKCQGAYSPEDNSTQWFHNESLISSQASSYFIDAATVDDSGEYRCQTNLSTLSDPVQLEVHIGWLLLQAPRWVFKEEDPIHLRCHSWKNTALHKVTYLQNGKGRKYFHHNSDFYIPKATLKDSGSYFCRGLVGSKNVSSETVNITITQGGGGGSGGGGSGGGGSDIQMTQSPSSLSASVGDRVTITCRASQDIRNYLNWYQQKPGKAPKLLIYYTSRLESGVPSRFSGSGSGTDYTLTISSLQPEDFATYYCQQGNTLPWTFGQGTKVEIKGGGGSGGGGSGGGGSEVQLVESGGGLVQPGGSLRLSCAASGYSFTGYTMNWVRQAPGKGLEWVALINPTKGVSTYNQKFKDRFTISVDKSKNTAYLQMNSLRAEDTAVYYCARSGYYGDSDWYFDVWGQGTLVTVSSGGHHHHHH

SEQ ID NO: 77 - protein, 191 aa, synthetic construct
GMRTEDLPKAVVFLEPQWYRVLEKDSVTLKCQGAYSPEDNSTQWFHNESLISSQASSYFIDAATVDDSGEYRCQTNLSTLSDPVQLEVHIGWLLLQAPRWVFKEEDPIHLRCHSWKNTALHKVTYLQNGKGRKYFHHNSDFYIPKATLKDSGSYFCRGMGKHRYSSETVNITITQGLAVPTISSFFPPGYQ

SEQ ID NO: 78 - protein, 450 aa, synthetic construct
GMRTEDLPKAVVFLEPQWYRVLEKDSVTLKCQGAYSPEDNSTQWFHNESLISSQASSYFIDAATVDDSGEYRCQTNLSTLSDPVQLEVHIGWLLLQAPRWVFKEEDPIHLRCHSWKNTALHKVTYLQNGKGRKYFHHNSDFYIPKATLKDSGSYFCRGMGKHRYSSETVNITITQGLAVPTISSFFPPGYQGGGGSGGGGSGGGGSDIQMTQSPSSLSASVGDRVTITCRASQDIRNYLNWYQQKPGKAPKLLIYYTSRLESGVPSRFSGSGSGTDYTLTISSLQPEDFATYYCQQGNTLPWTFGQGTKVEIKGGGGSGGGGSGGGGSEVQLVESGGGLVQPGGSLRLSCAASGYSFTGYTMNWVRQAPGKGLEWVALINPTKGVSTYNQKFKDRFTISVDKSKNTAYLQMNSLRAEDTAVYYCARSGYYGDSDWYFDVWGQGTLVTVSS

SEQ ID NO: 79 - protein, 458 aa, synthetic construct
GMRTEDLPKAVVFLEPQWYRVLEKDSVTLKCQGAYSPEDNSTQWFHNESLISSQASSYFIDAATVDDSGEYRCQTNLSTLSDPVQLEVHIGWLLLQAPRWVFKEEDPIHLRCHSWKNTALHKVTYLQNGKGRKYFHHNSDFYIPKATLKDSGSYFCRGMGKHRYSSETVNITITQGLAVPTISSFFPPGYQGGGGSGGGGSGGGGSDIQMTQSPSSLSASVGDRVTITCRASQDIRNYLNWYQQKPGKAPKLLIYYTSRLESGVPSRFSGSGSGTDYTLTISSLQPEDFATYYCQQGNTLPWTFGQGTKVEIKGGGGSGGGGSGGGGSEVQLVESGGGLVQPGGSLRLSCAASGYSFTGYTMNWVRQAPGKGLEWVALINPTKGVSTYNQKFKDRFTISVDKSKNTAYLQMNSLRAEDTAVYYCARSGYYGDSDWYFDVWGQGTLVTVSSGGHHHHHH

SEQ ID NO: 80 - protein, 168 aa, synthetic construct
KAVITLQPPWVSVFQEETVTLHCEVLHLPGSSSTQWFLNGTATQTSTPSYRITSASVNDSGEYRCQRGLSGRSDPIQLEIHRGWLLLQVSSRVFTEGEPLALRCHAWKDKLVYNVLYYRNGKAFKFFHWNSNLTILKTNISHNGTYHCSGMGKHRYTSAGISVTVKEL

SEQ ID NO: 81 - protein, 427 aa, synthetic construct
KAVITLQPPWVSVFQEETVTLHCEVLHLPGSSSTQWFLNGTATQTSTPSYRITSASVNDSGEYRCQRGLSGRSDPIQLEIHRGWLLLQVSSRVFTEGEPLALRCHAWKDKLVYNVLYYRNGKAFKFFHWNSNLTILKTNISHNGTYHCSGMGKHRYTSAGISVTVKELGGGGSGGGGSGGGGSDIQMTQSPSSLSASVGDRVTITCRASQDIRNYLNWYQQKPGKAPKLLIYYTSRLESGVPSRFSGSGSGTDYTLTISSLQPEDFATYYCQQGNTLPWTFGQGTKVEIKGGGGSGGGGSGGGGSEVQLVESGGGLVQPGGSLRLSCAASGYSFTGYTMNWVRQAPGKGLEWVALINPTKGVSTYNQKFKDRFTISVDKSKNTAYLQMNSLRAEDTAVYYCARSGYYGDSDWYFDVWGQGTLVTVSS

SEQ ID NO: 82 - protein, 435 aa, synthetic construct
KAVITLQPPWVSVFQEETVTLHCEVLHLPGSSSTQWFLNGTATQTSTPSYRITSASVNDSGEYRCQRGLSGRSDPIQLEIHRGWLLLQVSSRVFTEGEPLALRCHAWKDKLVYNVLYYRNGKAFKFFHWNSNLTILKTNISHNGTYHCSGMGKHRYTSAGISVTVKELGGGGSGGGGSGGGGSDIQMTQSPSSLSASVGDRVTITCRASQDIRNYLNWYQQKPGKAPKLLIYYTSRLESGVPSRFSGSGSGTDYTLTISSLQPEDFATYYCQQGNTLPWTFGQGTKVEIKGGGGSGGGGSGGGGSEVQLVESGGGLVQPGGSLRLSCAASGYSFTGYTMNWVRQAPGKGLEWVALINPTKGVSTYNQKFKDRFTISVDKSKNTAYLQMNSLRAEDTAVYYCARSGYYGDSDWYFDVWGQGTLVTVSSGGHHHHHH

SEQ ID NO: 83 - protein, 442 aa, synthetic construct
AAPPKAVLKLEPPWINVLQEDSVTLTCQGARSPESDSIQWFHNGNLIPTHTQPSYRFKANNNDSGEYTCQTGQTSLSDPVHLTVLSEWLVLQTPHLEFQEGETIMLRCHSWKDKPLVKVTFFQNGKSQKFSHLDPTFSIPQANHSHSGDYHCTGNIGYTLFSSKPVTITVQVPSMGSSSPMGIGGGGSGGGGSGGGGSDIQMTQSPSSLSASVGDRVTITCRASQDIRNYLNWYQQKPGKAPKLLIYYTSRLESGVPSRFSGSGSGTDYTLTISSLQPEDFATYYCQQGNTLPWTFGQGTKVEIKGGGGSGGGGSGGGGSEVQLVESGGGLVQPGGSLRLSCAASGYSFTGYTMNWVRQAPGKGLEWVALINPTKGVSTYNQKFKDRFTISVDKSKNTAYLQMNSLRAEDTAVYYCARSGYYGDSDWYFDVWGQGTLVTVSS

SEQ ID NO: 84 - protein, 450 aa, synthetic construct
AAPPKAVLKLEPPWINVLQEDSVTLTCQGARSPESDSIQWFHNGNLIPTHTQPSYRFKANNNDSGEYTCQTGQTSLSDPVHLTVLSEWLVLQTPHLEFQEGETIMLRCHSWKDKPLVKVTFFQNGKSQKFSHLDPTFSIPQANHSHSGDYHCTGNIGYTLFSSKPVTITVQVPSMGSSSPMGIGGGGSGGGGSGGGGSDIQMTQSPSSLSASVGDRVTITCRASQDIRNYLNWYQQKPGKAPKLLIYYTSRLESGVPSRFSGSGSGTDYTLTISSLQPEDFATYYCQQGNTLPWTFGQGTKVEIKGGGGSGGGGSGGGGSEVQLVESGGGLVQPGGSLRLSCAASGYSFTGYTMNWVRQAPGKGLEWVALINPTKGVSTYNQKFKDRFTISVDKSKNTAYLQMNSLRAEDTAVYYCARSGYYGDSDWYFDVWGQGTLVTVSSGGHHHHHH

SEQ ID NO: 85 - protein, 431 aa, synthetic construct
APPKAVLKLEPQWINVLQEDSVTLTCRGTHSPESDSIQWFHNGNLIPTHTQPSYRFKANNNDSGEYTCQTGQTSLSDPVHLTVLSEWLVLQTPHLEFQEGETIVLRCHSWKDKPLVKVTFFQNGKSKKFSRSDPNFSIPQANHSHSGDYHCTGNIGYTLYSSKPVTITVQAPGGGGSGGGGSGGGGSDIQMTQSPSSLSASVGDRVTITCRASQDIRNYLNWYQQKPGKAPKLLIYYTSRLESGVPSRFSGSGSGTDYTLTISSLQPEDFATYYCQQGNTLPWTFGQGTKVEIKGGGGSGGGGSGGGGSEVQLVESGGGLVQPGGSLRLSCAASGYSFTGYTMNWVRQAPGKGLEWVALINPTKGVSTYNQKFKDRFTISVDKSKNTAYLQMNSLRAEDTAVYYCARSGYYGDSDWYFDVWGQGTLVTVSS

SEQ ID NO: 86 - protein, 439 aa, synthetic construct
APPKAVLKLEPQWINVLQEDSVTLTCRGTHSPESDSIQWFHNGNLIPTHTQPSYRFKANNNDSGEYTCQTGQTSLSDPVHLTVLSEWLVLQTPHLEFQEGETIVLRCHSWKDKPLVKVTFFQNGKSKKFSRSDPNFSIPQANHSHSGDYHCTGNIGYTLYSSKPVTITVQAPGGGGSGGGGSGGGGSDIQMTQSPSSLSASVGDRVTITCRASQDIRNYLNWYQQKPGKAPKLLIYYTSRLESGVPSRFSGSGSGTDYTLTISSLQPEDFATYYCQQGNTLPWTFGQGTKVEIKGGGGSGGGGSGGGGSEVQLVESGGGLVQPGGSLRLSCAASGYSFTGYTMNWVRQAPGKGLEWVALINPTKGVSTYNQKFKDRFTISVDKSKNTAYLQMNSLRAEDTAVYYCARSGYYGDSDWYFDVWGQGTLVTVSSGGHHHHHH

SEQ ID NO: 87 - protein, 442 aa, synthetic construct
GLQKAVVNLDPKWVRVLEEDSVTLRCQGTFSPEDNSIKWFHNESLIPHQDANYVIQSARVKDSGMYRCQTALSTISDPVQLEVHMGWLLLQTTKWLFQEGDPIHLRCHSWQNRPVRKVTYLQNGKGKKYFHENSELLIPKATHNDSGSYFCRGLIGHNNKSSASFRISLGDPGSPSMFPPWHQGGGGSGGGGSGGGGSDIQMTQSPSSLSASVGDRVTITCRASQDIRNYLNWYQQKPGKAPKLLIYYTSRLESGVPSRFSGSGSGTDYTLTISSLQPEDFATYYCQQGNTLPWTFGQGTKVEIKGGGGSGGGGSGGGGSEVQLVESGGGLVQPGGSLRLSCAASGYSFTGYTMNWVRQAPGKGLEWVALINPTKGVSTYNQKFKDRFTISVDKSKNTAYLQMNSLRAEDTAVYYCARSGYYGDSDWYFDVWGQGTLVTVSS

SEQ ID NO: 88 - protein, 450 aa, synthetic construct
GLQKAVVNLDPKWVRVLEEDSVTLRCQGTFSPEDNSIKWFHNESLIPHQDANYVIQSARVKDSGMYRCQTALSTISDPVQLEVHMGWLLLQTTKWLFQEGDPIHLRCHSWQNRPVRKVTYLQNGKGKKYFHENSELLIPKATHNDSGSYFCRGLIGHNNKSSASFRISLGDPGSPSMFPPWHQGGGGSGGGGSGGGGSDIQMTQSPSSLSASVGDRVTITCRASQDIRNYLNWYQQKPGKAPKLLIYYTSRLESGVPSRFSGSGSGTDYTLTISSLQPEDFATYYCQQGNTLPWTFGQGTKVEIKGGGGSGGGGSGGGGSEVQLVESGGGLVQPGGSLRLSCAASGYSFTGYTMNWVRQAPGKGLEWVALINPTKGVSTYNQKFKDRFTISVDKSKNTAYLQMNSLRAEDTAVYYCARSGYYGDSDWYFDVWGQGTLVTVSSGGHHHHHH

SEQ ID NO: 89 - protein, 108 aa, synthetic construct
ASTKGPSVFPLAPSSKSTSGGTAALGCLVKDYFPEPVTVSWNSGALTSGVHTFPAVLQSSGLYSLSSVVTVPSSSLGTQTYICNVNHKPSNTKVDKKVEPKSCDKTHT

SEQ ID NO: 90 - protein, 107 aa, synthetic construct [sequence omitted]

SEQ ID NO: 91 - protein, 106 aa, synthetic construct
GQPKANPTVTLFPPSSEELQANKATLVCLISDFYPGAVTVAWKADGSPVKAGVETTKPSKQSNNKYAASSYLSLTPEQWKSHRSYSCQVTHEGSTVEKTVAPTECS

SEQ ID NO: 92 - protein, 106 aa, synthetic construct
GQPKAAPSVTLFPPSSEELQANKATLVCLISDFYPGAVTVAWKADSSPVKAGVETTTPSKQSNNKYAASSYLSLTPEQWKSHRSYSCQVTHEGSTVEKTVAPTECS

SEQ ID NO: 93 - protein, 106 aa, synthetic construct
GQPKAAPSVTLFPPSSEELQANKATLVCLISDFYPGAVTVAWKADSSPVKAGVETTTPSKQSNNKYAASSYLSLTPEQWKSHKSYSCQVTHEGSTVEKTVAPTECS

SEQ ID NO: 94 - protein, 108 aa, synthetic construct
ASTKGPSVFPLAPSSKSTSGGTAALGCLVKDYFPEPVTVSWNSGALTSGVHTFPAVLQSSGLYSLSSVVTVPSSSLGTQTYICNVNHKPSNTKVDKKVEPKSSDKTHT

SEQ ID NO: 95 - protein, 107 aa, synthetic construct
RTVAAPSVFIFPPSDEQLKSGTASVVCLLNNFYPREAKVQWKVDNALQSGNSQESVTEQDSKDSTYSLSSTLTLSKADYEKHKVYACEVTHQGLSSPVTKSFNRGES

SEQ ID NO: 96 - protein, 106 aa, synthetic construct
GQPKANPTVTLFPPSSEELQANKATLVCLISDFYPGAVTVAWKADGSPVKAGVETTKPSKQSNNKYAASSYLSLTPEQWKSHRSYSCQVTHEGSTVEKTVAPTESS

SEQ ID NO: 97 - protein, 106 aa, synthetic construct
GQPKAAPSVTLFPPSSEELQANKATLVCLISDFYPGAVTVAWKADSSPVKAGVETTTPSKQSNNKYAASSYLSLTPEQWKSHRSYSCQVTHEGSTVEKTVAPTESS

SEQ ID NO: 98 - protein, 106 aa, synthetic construct
GQPKAAPSVTLFPPSSEELQANKATLVCLISDFYPGAVTVAWKADSSPVKAGVETTTPSKQSNNKYAASSYLSLTPEQWKSHKSYSCQVTHEGSTVEKTVAPTESS

SEQ ID NO: 99 - protein, 106 aa, synthetic construct
SQPKAAPSVTLFPPSSEELQANKATLVCLVSDFYPGAVTVAWKADGSPVKVGVETTKPSKQSNNKYAASSYLSLTPEQWKSHRSYSCRVTHEGSTVEKTVAPAESS

SEQ ID NO: 100 - protein, 108 aa, synthetic construct
ASTKGPSVFPLAPSSKSTSGGTAALGCLVKDYFPEPVTVSWNSGALTSGVHTCPAVLQSSGLYSLSSVVTVPSSSLGTQTYICNVNHKPSNTKVDKKVEPKSSDKTHT

SEQ ID NO: 101 - protein, 107 aa, synthetic construct
RTVAAPSVFIFPPSDEQLKSGTASVVCLLNNFYPREAKVQWKVDNALQSGNSQESVTEQDSKDSTYSLCSTLTLSKADYEKHKVYACEVTHQGLSSPVTKSFNRGES

SEQ ID NO: 102 - protein, 106 aa, synthetic construct
GQPKANPTVTLFPPSSEELQANKATLVCLISDFYPGAVTVAWKADGSPVKAGVETTKPSKQSNNKYAACSYLSLTPEQWKSHRSYSCQVTHEGSTVEKTVAPTESS

SEQ ID NO: 103 - protein, 106 aa, synthetic construct
GQPKAAPSVTLFPPSSEELQANKATLVCLISDFYPGAVTVAWKADSSPVKAGVETTTPSKQSNNKYAACSYLSLTPEQWKSHRSYSCQVTHEGSTVEKTVAPTESS

SEQ ID NO: 104 - protein, 106 aa, synthetic construct
GQPKAAPSVTLFPPSSEELQANKATLVCLISDFYPGAVTVAWKADSSPVKAGVETTTPSKQSNNKYAACSYLSLTPEQWKSHKSYSCQVTHEGSTVEKTVAPTESS

SEQ ID NO: 105 - protein, 106 aa, synthetic construct
SQPKAAPSVTLFPPSSEELQANKATLVCLVSDFYPGAVTVAWKADGSPVKVGVETTKPSKQSNNKYAACSYLSLTPEQWKSHRSYSCRVTHEGSTVEKTVAPAESS

SEQ ID NO: 106 - protein, 230 aa, synthetic construct
EVQLVESGGGLVQPGGSLRLSCAASGYSFTGYTMNWVRQAPGKGLEWVALINPTKGVSTYNQKFKDRFTISVDKSKNTAYLQMNSLRAEDTAVYYCARSGYYGDSDWYFDVWGQGTLVTVSSASTKGPSVFPLAPSSKSTSGGTAALGCLVKDYFPEPVTVSWNSGALTSGVHTFPAVLQSSGLYSLSSVVTVPSSSLGTQTYICNVNHKPSNTKVDKKVEPKSSDKTHT

SEQ ID NO: 107 - protein, 422 aa, synthetic construct
EVQLVESGGGLVQPGGSLRLSCAASGYSFTGYTMNWVRQAPGKGLEWVALINPTKGVSTYNQKFKDRFTISVDKSKNTAYLQMNSLRAEDTAVYYCARSGYYGDSDWYFDVWGQGTLVTVSSASTKGPSVFPLAPSSKSTSGGTAALGCLVKDYFPEPVTVSWNSGALTSGVHTFPAVLQSSGLYSLSSVVTVPSSSLGTQTYICNVNHKPSNTKVDKKVEPKSSDKTHTGGGGSGGGGSGGGGSGMRTEDLPKAVVFLEPQWYRVLEKDSVTLKCQGAYSPEDNSTQWFHNESLISSQASSYFIDAATVDDSGEYRCQTNLSTLSDPVQLEVHIGWLLLQAPRWVFKEEDPIHLRCHSWKNTALHKVTYLQNGKGRKYFHHNSDFYIPKATLKDSGSYFCRGLVGSKNVSSETVNITITQG

SEQ ID NO: 108 - protein, 406 aa, synthetic construct
DIQMTQSPSSLSASVGDRVTITCRASQDIRNYLNWYQQKPGKAPKLLIYYTSRLESGVPSRFSGSGSGTDYTLTISSLQPEDFATYYCQQGNTLPWTFGQGTKVEIKRTVAAPSVFIFPPSDEQLKSGTASVVCLLNNFYPREAKVQWKVDNALQSGNSQESVTEQDSKDSTYSLSSTLTLSKADYEKHKVYACEVTHQGLSSPVTKSFNRGESGGGGSGGGGSGGGGSGMRTEDLPKAVVFLEPQWYRVLEKDSVTLKCQGAYSPEDNSTQWFHNESLISSQASSYFIDAATVDDSGEYRCQTNLSTLSDPVQLEVHIGWLLLQAPRWVFKEEDPIHLRCHSWKNTALHKVTYLQNGKGRKYFHHNSDFYIPKATLKDSGSYFCRGLVGSKNVSSETVNITITQG

SEQ ID NO: 109 - protein, 300 aa, synthetic construct
GMRTEDLPKAVVFLEPQWYRVLEKDSVTLKCQGAYSPEDNSTQWFHNESLISSQASSYFIDAATVDDSGEYRCQTNLSTLSDPVQLEVHIGWLLLQAPRWVFKEEDPIHLRCHSWKNTALHKVTYLQNGKGRKYFHHNSDFYIPKATLKDSGSYFCRGLVGSKNVSSETVNITITQGGGGGSGGGGSGGGGSASTKGPSVFPLAPSSKSTSGGTAALGCLVKDYFPEPVTVSWNSGALTSGVHTCPAVLQSSGLYSLSSVVTVPSSSLGTQTYICNVNHKPSNTKVDKKVEPKSSDKTHT

SEQ ID NO: 110 - protein, 559 aa, synthetic construct
GMRTEDLPKAVVFLEPQWYRVLEKDSVTLKCQGAYSPEDNSTQWFHNESLISSQASSYFIDAATVDDSGEYRCQTNLSTLSDPVQLEVHIGWLLLQAPRWVFKEEDPIHLRCHSWKNTALHKVTYLQNGKGRKYFHHNSDFYIPKATLKDSGSYFCRGLVGSKNVSSETVNITITQGGGGGSGGGGSGGGGSASTKGPSVFPLAPSSKSTSGGTAALGCLVKDYFPEPVTVSWNSGALTSGVHTCPAVLQSSGLYSLSSVVTVPSSSLGTQTYICNVNHKPSNTKVDKKVEPKSSDKTHTGGGGSGGGGSGGGGSDIQMTQSPSSLSASVGDRVTITCRASQDIRNYLNWYQQKPGKAPKLLIYYTSRLESGVPSRFSGSGSGTDYTLTISSLQPEDFATYYCQQGNTLPWTFGQGTKVEIKGGGGSGGGGSGGGGSEVQLVESGGGLVQPGGSLRLSCAASGYSFTGYTMNWVRQAPGKGLEWVALINPTKGVSTYNQKFKDRFTISVDKSKNTAYLQMNSLRAEDTAVYYCARSGYYGDSDWYFDVWGQGTLVTVSS

SEQ ID NO: 111 - protein, 366 aa, synthetic construct
RTVAAPSVFIFPPSDEQLKSGTASVVCLLNNFYPREAKVQWKVDNALQSGNSQESVTEQDSKDSTYSLCSTLTLSKADYEKHKVYACEVTHQGLSSPVTKSFNRGESGGGGSGGGGSGGGGSDIQMTQSPSSLSASVGDRVTITCRASQDIRNYLNWYQQKPGKAPKLLIYYTSRLESGVPSRFSGSGSGTDYTLTISSLQPEDFATYYCQQGNTLPWTFGQGTKVEIKGGGGSGGGGSGGGGSEVQLVESGGGLVQPGGSLRLSCAASGYSFTGYTMNWVRQAPGKGLEWVALINPTKGVSTYNQKFKDRFTISVDKSKNTAYLQMNSLRAEDTAVYYCARSGYYGDSDWYFDVWGQGTLVTVSS

SEQ ID NO: 112 - protein, 558 aa, synthetic construct
GMRTEDLPKAVVFLEPQWYRVLEKDSVTLKCQGAYSPEDNSTQWFHNESLISSQASSYFIDAATVDDSGEYRCQTNLSTLSDPVQLEVHIGWLLLQAPRWVFKEEDPIHLRCHSWKNTALHKVTYLQNGKGRKYFHHNSDFYIPKATLKDSGSYFCRGLVGSKNVSSETVNITITQGGGGGSGGGGSGGGGSRTVAAPSVFIFPPSDEQLKSGTASVVCLLNNFYPREAKVQWKVDNALQSGNSQESVTEQDSKDSTYSLCSTLTLSKADYEKHKVYACEVTHQGLSSPVTKSFNRGESGGGGSGGGGSGGGGSDIQMTQSPSSLSASVGDRVTITCRASQDIRNYLNWYQQKPGKAPKLLIYYTSRLESGVPSRFSGSGSGTDYTLTISSLQPEDFATYYCQQGNTLPWTFGQGTKVEIKGGGGSGGGGSGGGGSEVQLVESGGGLVQPGGSLRLSCAASGYSFTGYTMNWVRQAPGKGLEWVALINPTKGVSTYNQKFKDRFTISVDKSKNTAYLQMNSLRAEDTAVYYCARSGYYGDSDWYFDVWGQGTLVTVSS

SEQ ID NO: 113 - protein, 109 aa, synthetic construct
ASTKGPSVFPLAPSSKSTSGGTAALGCLVKDYFPEPVTVSWNSGALTSGVHTFPAVLQSSGLYSLSSVVTVPSSSLGTQTYICNVNHKPSNTKVDKKVEPKSSDKTHTC

SEQ ID NO: 114 - protein, 109 aa, synthetic construct
ASTKGPSVFPLAPSSKSTSGGTAALGCLVKDYFPEPVTVSWNSGALTSGVHTCPAVLQSSGLYSLSSVVTVPSSSLGTQTYICNVNHKPSNTKVDKKVEPKSSDKTHTC

SEQ ID NO: 115 - protein, 231 aa, synthetic construct
EVQLVESGGGLVQPGGSLRLSCAASGYSFTGYTMNWVRQAPGKGLEWVALINPTKGVSTYNQKFKDRFTISVDKSKNTAYLQMNSLRAEDTAVYYCARSGYYGDSDWYFDVWGQGTLVTVSSASTKGPSVFPLAPSSKSTSGGTAALGCLVKDYFPEPVTVSWNSGALTSGVHTFPAVLQSSGLYSLSSVVTVPSSSLGTQTYICNVNHKPSNTKVDKKVEPKSSDKTHTC

SEQ ID NO: 116 - protein, 231 aa, synthetic construct
EVQLVESGGGLVQPGGSLRLSCAASGYSFTGYTMNWVRQAPGKGLEWVALINPTKGVSTYNQKFKDRFTISVDKSKNTAYLQMNSLRAEDTAVYYCARSGYYGDSDWYFDVWGQGTLVTVSSASTKGPSVFPLAPSSKSTSGGTAALGCLVKDYFPEPVTVSWNSGALTSGVHTCPAVLQSSGLYSLSSVVTVPSSSLGTQTYICNVNHKPSNTKVDKKVEPKSSDKTHTC

SEQ ID NO: 117 - protein, 406 aa, synthetic construct
DIQMTQSPSSLSASVGDRVTITCRASQDIRNYLNWYQQKPGKAPKLLIYYTSRLESGVPSRFSGSGSGTDYTLTISSLQPEDFATYYCQQGNTLPWTFGQGTKVEIKRTVAAPSVFIFPPSDEQLKSGTASVVCLLNNFYPREAKVQWKVDNALQSGNSQESVTEQDSKDSTYSLCSTLTLSKADYEKHKVYACEVTHQGLSSPVTKSFNRGESGGGGSGGGGSGGGGSGMRTEDLPKAVVFLEPQWYRVLEKDSVTLKCQGAYSPEDNSTQWFHNESLISSQASSYFIDAATVDDSGEYRCQTNLSTLSDPVQLEVHIGWLLLQAPRWVFKEEDPIHLRCHSWKNTALHKVTYLQNGKGRKYFHHNSDFYIPKATLKDSGSYFCRGLVGSKNVSSETVNITITQG

SEQ ID NO: 118 - protein, 628 aa, synthetic construct
GMRTEDLPKAVVFLEPQWYRVLEKDSVTLKCQGAYSPEDNSTQWFHNESLISSQASSYFIDAATVDDSGEYRCQTNLSTLSDPVQLEVHIGWLLLQAPRWVFKEEDPIHLRCHSWKNTALHKVTYLQNGKGRKYFHHNSDFYIPKATLKDSGSYFCRGLVGSKNVSSETVNITITQGGGGGSGGGGSGGGGSDIQMTQSPSSLSASVGDRVTITCRASQDIRNYLNWYQQKPGKAPKLLIYYTSRLESGVPSRFSGSGSGTDYTLTISSLQPEDFATYYCQQGNTLPWTFGQGTKVEIKGGGGSGGGGSGGGGSEVQLVESGGGLVQPGGSLRLSCAASGYSFTGYTMNWVRQAPGKGLEWVALINPTKGVSTYNQKFKDRFTISVDKSKNTAYLQMNSLRAEDTAVYYCARSGYYGDSDWYFDVWGQGTLVTVSSGGGGSGGGGSGGGGSGMRTEDLPKAVVFLEPQWYRVLEKDSVTLKCQGAYSPEDNSTQWFHNESLISSQASSYFIDAATVDDSGEYRCQTNLSTLSDPVQLEVHIGWLLLQAPRWVFKEEDPIHLRCHSWKNTALHKVTYLQNGKGRKYFHHNSDFYIPKATLKDSGSYFCRGLVGSKNVSSETVNITITQG

SEQ ID NO: 119 - protein, 634 aa, synthetic construct
AAPPKAVLKLEPPWINVLQEDSVTLTCQGARSPESDSIQWFHNGNLIPTHTQPSYRFKANNNDSGEYTCQTGQTSLSDPVHLTVLSEWLVLQTPHLEFQEGETIMLRCHSWKDKPLVKVTFFQNGKSQKFSHLDPTFSIPQANHSHSGDYHCTGNIGYTLFSSKPVTITVQVPSMGSSSPMGIGGGGSGGGGSGGGGSDIQMTQSPSSLSASVGDRVTITCRASQDIRNYLNWYQQKPGKAPKLLIYYTSRLESGVPSRFSGSGSGTDYTLTISSLQPEDFATYYCQQGNTLPWTFGQGTKVEIKGGGGSGGGGSGGGGSEVQLVESGGGLVQPGGSLRLSCAASGYSFTGYTMNWVRQAPGKGLEWVALINPTKGVSTYNQKFKDRFTISVDKSKNTAYLQMNSLRAEDTAVYYCARSGYYGDSDWYFDVWGQGTLVTVSSGGGGSGGGGSGGGGSGMRTEDLPKAVVFLEPQWYRVLEKDSVTLKCQGAYSPEDNSTQWFHNESLISSQASSYFIDAATVDDSGEYRCQTNLSTLSDPVQLEVHIGWLLLQAPRWVFKEEDPIHLRCHSWKNTALHKVTYLQNGKGRKYFHHNSDFYIPKATLKDSGSYFCRGLVGSKNVSSETVNITITQG

SEQ ID NO: 120 - protein, 657 aa, synthetic construct
QEGDFPMPFISAKSSPVIPLDGSVKIQCQAIREAYLTQLMIIKNSTYREIGRRLKFWNETDPEFVIDHMDANKAGRYQCQYRIGHYRFRYSDTLELVVTGLYGKPFLSADRGLVLMPGENISLTCSSAHIPFDRFSLAKEGELSLPQHQSGEHPANFSLGPVDLNVSGIYRCYGWYNRSPYLWSFPSNALELVVTDSIHQDYTTQNGGGGSGGGGSGGGGSGMRTEDLPKAVVFLEPQWYRVLEKDSVTLKCQGAYSPEDNSTQWFHNESLISSQASSYFIDAATVDDSGEYRCQTNLSTLSDPVQLEVHIGWLLLQAPRWVFKEEDPIHLRCHSWKNTALHKVTYLQNGKGRKYFHHNSDFYIPKATLKDSGSYFCRGLVGSKNVSSETVNITITQGGGGGSGGGGSGGGGSDIQMTQSPSSLSASVGDRVTITCRASQDIRNYLNWYQQKPGKAPKLLIYYTSRLESGVPSRFSGSGSGTDYTLTISSLQPEDFATYYCQQGNTLPWTFGQGTKVEIKGGGGSGGGGSGGGGSEVQLVESGGGLVQPGGSLRLSCAASGYSFTGYTMNWVRQAPGKGLEWVALINPTKGVSTYNQKFKDRFTISVDKSKNTAYLQMNSLRAEDTAVYYCARSGYYGDSDWYFDVWGQGTLVTVSS

SEQ ID NO: 121 - protein, 472 aa, synthetic construct
QEGDFPMPFISAKSSPVIPLDGSVKIQCQAIREAYLTQLMIIKNSTYREIGRRLKFWNETDPEFVIDHMDANKAGRYQCQYRIGHYRFRYSDTLELVVTGGGGSGGGGSGGGGSQEGDFPMPFISAKSSPVIPLDGSVKIQCQAIREAYLTQLMIIKNSTYREIGRRLKFWNETDPEFVIDHMDANKAGRYQCQYRIGHYRFRYSDTLELVVTGGGGSGGGGSGGGGSDIQMTQSPSSLSASVGDRVTITCRASQDIRNYLNWYQQKPGKAPKLLIYYTSRLESGVPSRFSGSGSGTDYTLTISSLQPEDFATYYCQQGNTLPWTFGQGTKVEIKGGGGSGGGGSGGGGSEVQLVESGGGLVQPGGSLRLSCAASGYSFTGYTMNWVRQAPGKGLEWVALINPTKGVSTYNQKFKDRFTISVDKSKNTAYLQMNSLRAEDTAVYYCARSGYYGDSDWYFDVWGQGTLVTVSS

SEQ ID NO: 122 - protein, 516 aa, synthetic construct
QVQLQESGGGLVQAGDSLRISCRASGLTVNDLYMGWFRQAPGKEREFVGRVTPGDNTDYTYYVDSVKGRFTISRDSAKNTVYLQMNSLKLEDTAVYLCAGRRFGSSEWDYWGQGTQVTVSSGGGGSGGGGSGGGGSQVQLQESGGGLVQAGDSLRISCRASGLTVNDLYMGWFRQAPGKEREFVGRVTPGDNTDYTYYVDSVKGRFTISRDSAKNTVYLQMNSLKLEDTAVYLCAGRRFGSSEWDYWGQGTQVTVSSGGGGSGGGGSGGGGSDIQMTQSPSSLSASVGDRVTITCRASQDIRNYLNWYQQKPGKAPKLLIYYTSRLESGVPSRFSGSGSGTDYTLTISSLQPEDFATYYCQQGNTLPWTFGQGTKVEIKGGGGSGGGGSGGGGSEVQLVESGGGLVQPGGSLRLSCAASGYSFTGYTMNWVRQAPGKGLEWVALINPTKGVSTYNQKFKDRFTISVDKSKNTAYLQMNSLRAEDTAVYYCARSGYYGDSDWYFDVWGQGTLVTVSS

SEQ ID NO: 123 - protein, 572 aa, synthetic construct
QVQLQESGGGLVQAGDSLRISCRASGLTVNDLYMGWFRQAPGKEREFVGRVTPGDNTDYTYYVDSVKGRFTISRDSAKNTVYLQMNSLKLEDTAVYLCAGRRFGSSEWDYWGQGTQVTVSSGGGGSGGGGSGGGGSGMRTEDLPKAVVFLEPQWYRVLEKDSVTLKCQGAYSPEDNSTQWFHNESLISSQASSYFIDAATVDDSGEYRCQTNLSTLSDPVQLEVHIGWLLLQAPRWVFKEEDPIHLRCHSWKNTALHKVTYLQNGKGRKYFHHNSDFYIPKATLKDSGSYFCRGLVGSKNVSSETVNITITQGGGGGSGGGGSGGGGSDIQMTQSPSSLSASVGDRVTITCRASQDIRNYLNWYQQKPGKAPKLLIYYTSRLESGVPSRFSGSGSGTDYTLTISSLQPEDFATYYCQQGNTLPWTFGQGTKVEIKGGGGSGGGGSGGGGSEVQLVESGGGLVQPGGSLRLSCAASGYSFTGYTMNWVRQAPGKGLEWVALINPTKGVSTYNQKFKDRFTISVDKSKNTAYLQMNSLRAEDTAVYYCARSGYYGDSDWYFDVWGQGTLVTVSS

SEQ ID NO: 124 - protein, 422 aa, synthetic construct
EVQLVESGGGLVQPGGSLRLSCAASGYSFTGYTMNWVRQAPGKGLEWVALINPTKGVSTYNQKFKDRFTISVDKSKNTAYLQMNSLRAEDTAVYYCARSGYYGDSDWYFDVWGQGTLVTVSSASTKGPSVFPLAPSSKSTSGGTAALGCLVKDYFPEPVTVSWNSGALTSGVHTFPAVLQSSGLYSLSSVVTVPSSSLGTQTYICNVNHKPSNTKVDKKVEPKSCDKTHTGGGGSGGGGSGGGGSGMRTEDLPKAVVFLEPQWYRVLEKDSVTLKCQGAYSPEDNSTQWFHNESLISSQASSYFIDAATVDDSGEYRCQTNLSTLSDPVQLEVHIGWLLLQAPRWVFKEEDPIHLRCHSWKNTALHKVTYLQNGKGRKYFHHNSDFYIPKATLKDSGSYFCRGLVGSKNVSSETVNITITQG

SEQ ID NO: 125 - protein, 406 aa, synthetic construct
DIQMTQSPSSLSASVGDRVTITCRASQDIRNYLNWYQQKPGKAPKLLIYYTSRLESGVPSRFSGSGSGTDYTLTISSLQPEDFATYYCQQGNTLPWTFGQGTKVEIKRTVAAPSVFIFPPSDEQLKSGTASVVCLLNNFYPREAKVQWKVDNALQSGNSQESVTEQDSKDSTYSLSSTLTLSKADYEKHKVYACEVTHQGLSSPVTKSFNRGECGGGGSGGGGSGGGGSGMRTEDLPKAVVFLEPQWYRVLEKDSVTLKCQGAYSPEDNSTQWFHNESLISSQASSYFIDAATVDDSGEYRCQTNLSTLSDPVQLEVHIGWLLLQAPRWVFKEEDPIHLRCHSWKNTALHKVTYLQNGKGRKYFHHNSDFYIPKATLKDSGSYFCRGLVGSKNVSSETVNITITQG

SEQ ID NO: 126 - protein, 424 aa, synthetic construct
GMRTEDLPKAVVFLEPQWYRVLEKDSVTLKCQGAYSPEDNSTQWFHNESLISSQASSYFIDAATVDDSGEYRCQTNLSTLSDPVQLEVHIGWLLLQAPRWVFKEEDPIHLRCHSWKNTALHKVTYLQNGKGRKYFHHNSDFYIPKATLKDSGSYFCRGLVGSKNVSSETVNITITQGGGGGSGGGGSGGGGSEPKSSDKTHTCPPCPAPEAAGGPSVFLFPPKPKDTLMISRTPEVTCVVVDVSHEDPEVKFNWYVDGVEVHNAKTKPREEQYNSTYRVVSVLTVLHQDWLNGKEYKCKVSNKALAAPIEKTISKAKGQPREPQVYTLPPSRDELTKNQVSLSCAVKGFYPSDIAVEWESNGQPENNYKTTPPVLDSDGSFFLVSKLTVDKSRWQQGNVFSCSVMHEALHNHYTQKSLSLSPGK

SEQ ID NO: 127 - protein, 451 aa, synthetic construct
QVQLQESGGGLVQAGDSLRISCRASGLTVNDLYMGWFRQAPGKEREFVGRVTPGDNTDYTYYVDSVKGRFTISRDSAKNTVYLQMNSLKLEDTAVYLCAGRRFGSSEWDYWGQGTQVTVSSASTKGPSVFPLAPSSKSTSGGTAALGCLVKDYFPEPVTVSWNSGALTSGVHTFPAVLQSSGLYSLSSVVTVPSSSLGTQTYICNVNHKPSNTKVDKKVEPKSCDKTHTCPPCPAPEAAGGPSVFLFPPKPKDTLMISRTPEVTCVVVDVSHEDPEVKFNWYVDGVEVHNAKTKPREEQYNSTYRVVSVLTVLHQDWLNGKEYKCKVSNKALAAPIEKTISKAKGQPREPQVYTLPPSRDELTKNQVSLWCLVKGFYPSDIAVEWESNGQPENNYKTTPPVLDSDGSFFLYSKLTVDKSRWQQGNVFSCSVMHEALHNHYTQKSLSLSPGK

SEQ ID NO: 128 - protein, 490 aa, synthetic construct
DIQMTQSPSSLSASVGDRVTITCRASQDIRNYLNWYQQKPGKAPKLLIYYTSRLESGVPSRFSGSGSGTDYTLTISSLQPEDFATYYCQQGNTLPWTFGQGTKVEIKGGGGSGGGGSGGGGSEVQLVESGGGLVQPGGSLRLSCAASGYSFTGYTMNWVRQAPGKGLEWVALINPTKGVSTYNQKFKDRFTISVDKSKNTAYLQMNSLRAEDTAVYYCARSGYYGDSDWYFDVWGQGTLVTVSSGGGGSGGGGSGGGGEPKSSDKTHTCPPCPAPEAAGGPSVFLFPPKPKDTLMISRTPEVTCVVVDVSHEDPEVKFNWYVDGVEVHNAKTKPREEQYNSTYRVVSVLTVLHQDWLNGKEYKCKVSNKALAAPIEKTISKAKGQPREPQVYTLPPSRDELTKNQVSLWCLVKGFYPSDIAVEWESNGQPENNYKTTPPVLDSDGSFFLYSKLTVDKSRWQQGNVFSCSVMHEALHNHYTQKSLSLSPGK

SEQ ID NO: 129 - protein, 683 aa, synthetic construct
GMRTEDLPKAVVFLEPQWYRVLEKDSVTLKCQGAYSPEDNSTQWFHNESLISSQASSYFIDAATVDDSGEYRCQTNLSTLSDPVQLEVHIGWLLLQAPRWVFKEEDPIHLRCHSWKNTALHKVTYLQNGKGRKYFHHNSDFYIPKATLKDSGSYFCRGLVGSKNVSSETVNITITQGGGGGSGGGGSGGGGSDIQMTQSPSSLSASVGDRVTITCRASQDIRNYLNWYQQKPGKAPKLLIYYTSRLESGVPSRFSGSGSGTDYTLTISSLQPEDFATYYCQQGNTLPWTFGQGTKVEIKGGGGSGGGGSGGGGSEVQLVESGGGLVQPGGSLRLSCAASGYSFTGYTMNWVRQAPGKGLEWVALINPTKGVSTYNQKFKDRFTISVDKSKNTAYLQMNSLRAEDTAVYYCARSGYYGDSDWYFDVWGQGTLVTVSSGGGGSGGGGSGGGGSEPKSSDKTHTCPPCPAPEAAGGPSVFLFPPKPKDTLMISRTPEVTCVVVDVSHEDPEVKFNWYVDGVEVHNAKTKPREEQYNSTYRVVSVLTVLHQDWLNGKEYKCKVSNKALAAPIEKTISKAKGQPREPQVYTLPPSRDELTKNQVSLWCLVKGFYPSDIAVEWESNGQPENNYKTTPPVLDSDGSFFLYSKLTVDKSRWQQGNVFSCSVMHEALHNHYTQKSLSLSPGK

SEQ ID NO: 130 - protein, 129 aa, synthetic construct
QVQLQESGGGLVQAGGSLRLSCAVSGNTLSRYAMGWFRQTPGNEREFVAAIRWNNGATYYADSVEGRFTISRDSGKNTVYLQMNNLKPEDTAVYYCAGRFLGYASSNAYHEALYNYDYWGQGTQVTVSS

SEQ ID NO: 131 - protein, 388 aa, synthetic construct
QVQLQESGGGLVQAGGSLRLSCAVSGNTLSRYAMGWFRQTPGNEREFVAAIRWNNGATYYADSVEGRFTISRDSGKNTVYLQMNNLKPEDTAVYYCAGRFLGYASSNAYHEALYNYDYWGQGTQVTVSSGGGGSGGGGSGGGGSDIQMTQSPSSLSASVGDRVTITCRASQDIRNYLNWYQQKPGKAPKLLIYYTSRLESGVPSRFSGSGSGTDYTLTISSLQPEDFATYYCQQGNTLPWTFGQGTKVEIKGGGGSGGGGSGGGGSEVQLVESGGGLVQPGGSLRLSCAASGYSFTGYTMNWVRQAPGKGLEWVALINPTKGVSTYNQKFKDRFTISVDKSKNTAYLQMNSLRAEDTAVYYCARSGYYGDSDWYFDVWGQGTLVTVSS

SEQ ID NO: 132 - protein, 42 aa, synthetic construct
EFCLSSEFQCQSSGRCIPLAWVCDGDNDCRDDSDEKSCKPRT

SEQ ID NO: 133 - protein, 301 aa, synthetic construct
EFCLSSEFQCQSSGRCIPLAWVCDGDNDCRDDSDEKSCKPRTGGGGSGGGGSGGGGSDIQMTQSPSSLSASVGDRVTITCRASQDIRNYLNWYQQKPGKAPKLLIYYTSRLESGVPSRFSGSGSGTDYTLTISSLQPEDFATYYCQQGNTLPWTFGQGTKVEIKGGGGSGGGGSGGGGSEVQLVESGGGLVQPGGSLRLSCAASGYSFTGYTMNWVRQAPGKGLEWVALINPTKGVSTYNQKFKDRFTISVDKSKNTAYLQMNSLRAEDTAVYYCARSGYYGDSDWYFDVWGQGTLVTVSS

SEQ ID NO: 134 - protein, 120 aa, synthetic construct
EVQLQQSGAELVKPGASVKLSCTGSGFNIKDTYIYWLKQRPEQGLEWIGRIDPANGDTEYDPKFQGKATIRADTSSNTAYLQLSSLTSDDTVVYYCARKYGNNRAWFAFWGQGTLVTVSA

SEQ ID NO: 135 - protein, 107 aa, synthetic construct
QIVMTQTPKFLLVSAGDRVTITCKASQSVSDDVAWYQQKPGQSPKLLIYFASYRYTGVPDRFTGSGYGTDFTFTISSVQADDLAVYFCQQDYSSPLTFGAGTKVELK

SEQ ID NO: 136 - protein, 242 aa, synthetic construct
EVQLQQSGAELVKPGASVKLSCTGSGFNIKDTYIYWLKQRPEQGLEWIGRIDPANGDTEYDPKFQGKATIRADTSSNTAYLQLSSLTSDDTVVYYCARKYGNNRAWFAFWGQGTLVTVSAGGGGSGGGGSGGGGSQIVMTQTPKFLLVSAGDRVTITCKASQSVSDDVAWYQQKPGQSPKLLIYFASYRYTGVPDRFTGSGYGTDFTFTISSVQADDLAVYFCQQDYSSPLTFGAGTKVELK

SEQ ID NO: 137 - protein, 501 aa, synthetic construct
EVQLQQSGAELVKPGASVKLSCTGSGFNIKDTYIYWLKQRPEQGLEWIGRIDPANGDTEYDPKFQGKATIRADTSSNTAYLQLSSLTSDDTVVYYCARKYGNNRAWFAFWGQGTLVTVSAGGGGSGGGGSGGGGSQIVMTQTPKFLLVSAGDRVTITCKASQSVSDDVAWYQQKPGQSPKLLIYFASYRYTGVPDRFTGSGYGTDFTFTISSVQADDLAVYFCQQDYSSPLTFGAGTKVELKGGGGSGGGGSGGGGSDIQMTQSPSSLSASVGDRVTITCRASQDIRNYLNWYQQKPGKAPKLLIYYTSRLESGVPSRFSGSGSGTDYTLTISSLQPEDFATYYCQQGNTLPWTFGQGTKVEIKGGGGSGGGGSGGGGSEVQLVESGGGLVQPGGSLRLSCAASGYSFTGYTMNWVRQAPGKGLEWVALINPTKGVSTYNQKFKDRFTISVDKSKNTAYLQMNSLRAEDTAVYYCARSGYYGDSDWYFDVWGQGTLVTVSS

SEQ ID NO: 138 - protein, 228 aa, synthetic construct
EVQLQQSGAELVKPGASVKLSCTGSGFNIKDTYIYWLKQRPEQGLEWIGRIDPANGDTEYDPKFQGKATIRADTSSNTAYLQLSSLTSDDTVVYYCARKYGNNRAWFAFWGQGTLVTVSAASTKGPSVFPLAPSSKSTSGGTAALGCLVKDYFPEPVTVSWNSGALTSGVHTFPAVLQSSGLYSLSSVVTVPSSSLGTQTYICNVNHKPSNTKVDKKVEPKSSDKTHT

SEQ ID NO: 139 - protein, 229 aa, synthetic construct
EVQLQQSGAELVKPGASVKLSCTGSGFNIKDTYIYWLKQRPEQGLEWIGRIDPANGDTEYDPKFQGKATIRADTSSNTAYLQLSSLTSDDTVVYYCARKYGNNRAWFAFWGQGTLVTVSAASTKGPSVFPLAPSSKSTSGGTAALGCLVKDYFPEPVTVSWNSGALTSGVHTFPAVLQSSGLYSLSSVVTVPSSSLGTQTYICNVNHKPSNTKVDKKVEPKSSDKTHTC

SEQ ID NO: 140 - protein, 487 aa, synthetic construct
EVQLQQSGAELVKPGASVKLSCTGSGFNIKDTYIYWLKQRPEQGLEWIGRIDPANGDTEYDPKFQGKATIRADTSSNTAYLQLSSLTSDDTVVYYCARKYGNNRAWFAFWGQGTLVTVSAASTKGPSVFPLAPSSKSTSGGTAALGCLVKDYFPEPVTVSWNSGALTSGVHTFPAVLQSSGLYSLSSVVTVPSSSLGTQTYICNVNHKPSNTKVDKKVEPKSSDKTHTGGGGSGGGGSGGGGSDIQMTQSPSSLSASVGDRVTITCRASQDIRNYLNWYQQKPGKAPKLLIYYTSRLESGVPSRFSGSGSGTDYTLTISSLQPEDFATYYCQQGNTLPWTFGQGTKVEIKGGGGSGGGGSGGGGSEVQLVESGGGLVQPGGSLRLSCAASGYSFTGYTMNWVRQAPGKGLEWVALINPTKGVSTYNQKFKDRFTISVDKSKNTAYLQMNSLRAEDTAVYYCARSGYYGDSDWYFDVWGQGTLVTVSS

SEQ ID NO: 141 - protein, 403 aa, synthetic construct
FTFTISSVQADDLAVYFCQQDYSSPLTFGAGTKVELKRTVAAPSVFIFPPSDEQLKSGTASVVCLLNNFYPREAKVQWKVDNALQSGNSQESVTEQDSKDSTYSLSSTLTLSKADYEKHKVYACEVTHQGLSSPVTKSFNRGESGGGGSGGGGSGGGGSDIQMTQSPSSLSASVGDRVTITCRASQDIRNYLNWYQQKPGKAPKLLIYYTSRLESGVPSRFSGSGSGTDYTLTISSLQPEDFATYYCQQGNTLPWTFGQGTKVEIKGGGGSGGGGSGGGGSEVQLVESGGGLVQPGGSLRLSCAASGYSFTGYTMNWVRQAPGKGLEWVALINPTKGVSTYNQKFKDRFTISVDKSKNTAYLQMNSLRAEDTAVYYCARSGYYGDSDWYFDVWGQGTLVTVSS

SEQ ID NO: 142 - protein, 120 aa, synthetic construct [sequence omitted]

SEQ ID NO: 143 - protein, 131 aa, synthetic construct
DIQMDMRVPAQLLGLLLLWLPGAKCDIQMTQSPSSLSASVGDRVTITCSASSSVSYMNWYQQKPGKAPKRLIYDTSKLASGVPSRFSGSGSGTDFTLTISSLQPEDFATYYCQQWSSNPPTFGGGTKVEIK

SEQ ID NO: 144 - protein, 266 aa, synthetic construct
QVQLVQSGAEVKKPGASVKVSCKASGYTFISYTMHWVRQAPGQGLEWMGYINPRSGYTHYNQKLKDKATLTADKSASTAYMELSSLRSEDTAVYYCARSAYYDYDGFAYWGQGTLVTVSSGGGGSGGGGSGGGGSDIQMDMRVPAQLLGLLLLWLPGAKCDIQMTQSPSSLSASVGDRVTITCSASSSVSYMNWYQQKPGKAPKRLIYDTSKLASGVPSRFSGSGSGTDFTLTISSLQPEDFATYYCQQWSSNPPTFGGGTKVEIK

SEQ ID NO: 145 - protein, 458 aa, synthetic construct
GMRTEDLPKAVVFLEPQWYRVLEKDSVTLKCQGAYSPEDNSTQWFHNESLISSQASSYFIDAATVDDSGEYRCQTNLSTLSDPVQLEVHIGWLLLQAPRWVFKEEDPIHLRCHSWKNTALHKVTYLQNGKGRKYFHHNSDFYIPKATLKDSGSYFCRGLVGSKNVSSETVNITITQGGGGGSGGGGSGGGGSQVQLVQSGAEVKKPGASVKVSCKASGYTFISYTMHWVRQAPGQGLEWMGYINPRSGYTHYNQKLKDKATLTADKSASTAYMELSSLRSEDTAVYYCARSAYYDYDGFAYWGQGTLVTVSSGGGGSGGGGSGGGGSDIQMDMRVPAQLLGLLLLWLPGAKCDIQMTQSPSSLSASVGDRVTITCSASSSVSYMNWYQQKPGKAPKRLIYDTSKLASGVPSRFSGSGSGTDFTLTISSLQPEDFATYYCQQWSSNPPTFGGGTKVEIK

SEQ ID NO: 146 - protein, 119 aa, synthetic construct
EVQLVESGGGLVKPGGSLRLSCAASGFTFSSYGMFWVRQAPGKGLEWVATISRYSRYIYYPDSVKGRFTISRDNAKNSLYLQMNSLRAEDTAVYYCARRPLYGSSPDYWGQGTLVTVSS

SEQ ID NO: 147 - protein, 106 aa, synthetic construct
EIVLTQSPATLSLSPGERATLSCSASSSVTYVHWYQQKPGQAPRLLIYDTSKLASGIPARFSGSGSGTDFTLTISSLEPEDFAVYYCFOGSGYPLTFGSGTKLEMR

SEQ ID NO: 148 - protein, 240 aa, synthetic construct
EVQLVESGGGLVKPGGSLRLSCAASGFTFSSYGMFWVRQAPGKGLEWVATISRYSRYIYYPDSVKGRFTISRDNAKNSLYLQMNSLRAEDTAVYYCARRPLYGSSPDYWGQGTLVTVSSGGGGSGGGGSGGGGSEIVLTQSPATLSLSPGERATLSCSASSSVTYVHWYQQKPGQAPRLLIYDTSKLASGIPARFSGSGSGTDFTLTISSLEPEDFAVYYCFOGSGYPLTFGSGTKLEMR

SEQ ID NO: 149 - protein, 432 aa, synthetic construct
GMRTEDLPKAVVFLEPQWYRVLEKDSVTLKCQGAYSPEDNSTQWFHNESLISSQASSYFIDAATVDDSGEYRCQTNLSTLSDPVQLEVHIGWLLLQAPRWVFKEEDPIHLRCHSWKNTALHKVTYLQNGKGRKYFHHNSDFYIPKATLKDSGSYFCRGLVGSKNVSSETVNITITQGGGGGSGGGGSGGGGSEVQLVESGGGLVKPGGSLRLSCAASGFTFSSYGMFWVRQAPGKGLEWVATISRYSRYIYYPDSVKGRFTISRDNAKNSLYLQMNSLRAEDTAVYYCARRPLYGSSPDYWGQGTLVTVSSGGGGSGGGGSGGGGSEIVLTQSPATLSLSPGERATLSCSASSSVTYVHWYQQKPGQAPRLLIYDTSKLASGIPARFSGSGSGTDFTLTISSLEPEDFAVYYCFOGSGYPLTFGSGTKLEMR

SEQ ID NO: 150 - protein, 119 aa, synthetic construct [sequence omitted]

SEQ ID NO: 151 - protein, 110 aa, synthetic construct
DFMLTQPHSVSESPGKTVIISCTLSSGNIENNYVHWYQQRPGRAPTTVIFDDDKRPDGVPDRFSGSIDRSSNSASLTISGLQTEDEADYYCHSYVSSFNVFGGGTKLTVL

SEQ ID NO: 152 - protein, 244 aa, synthetic construct
EVQLLESGGGLVQPGGSLRLSCAASGFTFSSFPMAWVRQAPGKGLEWVSTISTSGGRTYYRDSVKGRFTISRDNSKNTLYLQMNSLRAEDTAVYYCAKFRQYSGGFDYWGQGTLVTVSSGGGGSGGGGSGGGGSDFMLTQPHSVSESPGKTVIISCTLSSGNIENNYVHWYQQRPGRAPTTVIFDDDKRPDGVPDRFSGSIDRSSNSASLTISGLQTEDEADYYCHSYVSSFNVFGGGTKLTVL

SEQ ID NO: 153 - protein, 436 aa, synthetic construct
GMRTEDLPKAVVFLEPQWYRVLEKDSVTLKCQGAYSPEDNSTQWFHNESLISSQASSYFIDAATVDDSGEYRCQTNLSTLSDPVQLEVHIGWLLLQAPRWVFKEEDPIHLRCHSWKNTALHKVTYLQNGKGRKYFHHNSDFYIPKATLKDSGSYFCRGLVGSKNVSSETVNITITQGGGGGSGGGGSGGGGSEVQLLESGGGLVQPGGSLRLSCAASGFTFSSFPMAWVRQAPGKGLEWVSTISTSGGRTYYRDSVKGRFTISRDNSKNTLYLQMNSLRAEDTAVYYCAKFRQYSGGFDYWGQGTLVTVSSGGGGSGGGGSGGGGSDFMLTQPHSVSESPGKTVIISCTLSSGNIENNYVHWYQQRPGRAPTTVIFDDDKRPDGVPDRFSGSIDRSSNSASLTISGLQTEDEADYYCHSYVSSFNVFGGGTKLTVL

SEQ ID NO: 154 - protein, 119 aa, synthetic construct
QVQLQQSGAELARPGASVKMSCKTSGYTFTRYTMHWVKQRPGQGLEWIGYINPSRGYTNYNQKFKDKATLTTDKSSSTAYMQLSSLTSEDSAVYYCARYYDDNYSLDYWGQGTTLTVSS

SEQ ID NO: 155 - protein, 106 aa, synthetic construct; identical to SEQ ID NO: 30

SEQ ID NO: 156 - protein, 240 aa, synthetic construct
QVQLQQSGAELARPGASVKMSCKTSGYTFTRYTMHWVKQRPGQGLEWIGYINPSRGYTNYNQKFKDKATLTTDKSSSTAYMQLSSLTSEDSAVYYCARYYDDNYSLDYWGQGTTLTVSSGGGGSGGGGSGGGGSQIVLTQSPSSLSASLGEKVTMTCRASSSVSYMNWYQQKPGTSPKRWIYDTSKVASGVPDRFSGSGSGTSYSLTISSMEAEDAATYYCQQWSSNPLTFGAGTKLELK

SEQ ID NO: 157 - protein, 432 aa, synthetic construct
GMRTEDLPKAVVFLEPQWYRVLEKDSVTLKCQGAYSPEDNSTQWFHNESLISSQASSYFIDAATVDDSGEYRCQTNLSTLSDPVQLEVHIGWLLLQAPRWVFKEEDPIHLRCHSWKNTALHKVTYLQNGKGRKYFHHNSDFYIPKATLKDSGSYFCRGLVGSKNVSSETVNITITQGGGGGSGGGGSGGGGSQVQLQQSGAELARPGASVKMSCKTSGYTFTRYTMHWVKQRPGQGLEWIGYINPSRGYTNYNQKFKDKATLTTDKSSSTAYMQLSSLTSEDSAVYYCARYYDDNYSLDYWGQGTTLTVSSGGGGSGGGGSGGGGSQIVLTQSPSSLSASLGEKVTMTCRASSSVSYMNWYQQKPGTSPKRWIYDTSKVASGVPDRFSGSGSGTSYSLTISSMEAEDAATYYCQQWSSNPLTFGAGTKLELK

SEQ ID NO: 158 - protein, 120 aa, synthetic construct
EVQLQQSGPELVKPGASMSCKASGYSFTGYIVNWLKQSHGKNLEWIGLINPYKGLTTYNQKFKGKATLTVDKSSSTAYMELLSLTSEDSAVYYCARSGYYGDSDWYFDVWGAGTTVTVSS

SEQ ID NO: 159 - protein, 109 aa, synthetic construct
DIQMTQTTSSLSASLGDRVTISCRASQDIRNYLNWYQQKPDGTVKLLIYTSRLHSGVPSRFSGSGSGTDYSLTAINLOPEDIATYFCQQGNTLPWTFGGGTKLVTKREL

SEQ ID NO: 160 - protein, 244 aa, synthetic construct
EVQLQQSGPELVKPGASMSCKASGYSFTGYIVNWLKQSHGKNLEWIGLINPYKGLTTYNQKFKGKATLTVDKSSSTAYMELLSLTSEDSAVYYCARSGYYGDSDWYFDVWGAGTTVTVSSGGGGSGGGGSGGGGSDIQMTQTTSSLSASLGDRVTISCRASQDIRNYLNWYQQKPDGTVKLLIYTSRLHSGVPSRFSGSGSGTDYSLTAINLOPEDIATYFCQQGNTLPWTFGGGTKLVTKREL

SEQ ID NO: 161 - protein, 436 aa, synthetic construct
GMRTEDLPKAVVFLEPQWYRVLEKDSVTLKCQGAYSPEDNSTQWFHNESLISSQASSYFIDAATVDDSGEYRCQTNLSTLSDPVQLEVHIGWLLLQAPRWVFKEEDPIHLRCHSWKNTALHKVTYLQNGKGRKYFHHNSDFYIPKATLKDSGSYFCRGLVGSKNVSSETVNITITQGGGGGSGGGGSGGGGSEVQLQQSGPELVKPGASMSCKASGYSFTGYIVNWLKQSHGKNLEWIGLINPYKGLTTYNQKFKGKATLTVDKSSSTAYMELLSLTSEDSAVYYCARSGYYGDSDWYFDVWGAGTTVTVSSGGGGSGGGGSGGGGSDIQMTQTTSSLSASLGDRVTISCRASQDIRNYLNWYQQKPDGTVKLLIYTSRLHSGVPSRFSGSGSGTDYSLTAINLOPEDIATYFCQQGNTLPWTFGGGTKLVTKREL

SEQ ID NO: 162 - protein, 123 aa, synthetic construct
QVQLQQSAAELARPGASVKMSCKASGYTFTRYTMQWVKQRPGQGLEWIGYINPSSGYIGYSQKFKDKTTLTADKSSSTAYMQLSSLTSEDSAVYYCARSKVYYDYDVYSMDYWGQGTSVTVSS

SEQ ID NO: 163 - protein, 106 aa, synthetic construct
QIILTQSPAIMSASPGEKVTMTCSASSSVSYMHWYQQKSGTSPKRWIYDTSKLASGVPARFSGSGSGTSYSLTISSMEAEDAATYYCQQWSSNPLTFGAGTKLELK

SEQ ID NO: 164 - protein, 244 aa, synthetic construct
QVQLQQSAAELARPGASVKMSCKASGYTFTRYTMQWVKQRPGQGLEWIGYINPSSGYIGYSQKFKDKTTLTADKSSSTAYMQLSSLTSEDSAVYYCARSKVYYDYDVYSMDYWGQGTSVTVSSGGGGSGGGGSGGGGSQIILTQSPAIMSASPGEKVTMTCSASSSVSYMHWYQQKSGTSPKRWIYDTSKLASGVPARFSGSGSGTSYSLTISSMEAEDAATYYCQQWSSNPLTFGAGTKLELK

SEQ ID NO: 165 - protein, 436 aa, synthetic construct
GMRTEDLPKAVVFLEPQWYRVLEKDSVTLKCQGAYSPEDNSTQWFHNESLISSQASSYFIDAATVDDSGEYRCQTNLSTLSDPVQLEVHIGWLLLQAPRWVFKEEDPIHLRCHSWKNTALHKVTYLQNGKGRKYFHHNSDFYIPKATLKDSGSYFCRGLVGSKNVSSETVNITITQGGGGGSGGGGSGGGGSQVQLQQSAAELARPGASVKMSCKASGYTFTRYTMQWVKQRPGQGLEWIGYINPSSGYIGYSQKFKDKTTLTADKSSSTAYMQLSSLTSEDSAVYYCARSKVYYDYDVYSMDYWGQGTSVTVSSGGGGSGGGGSGGGGSQIILTQSPAIMSASPGEKVTMTCSASSSVSYMHWYQQKSGTSPKRWIYDTSKLASGVPARFSGSGSGTSYSLTISSMEAEDAATYYCQQWSSNPLTFGAGTKLELK

SEQ ID NO: 166 - protein, 123 aa, synthetic construct
EVQLVESGGGLVQPGGSLRLSCAASGFPLSSYAMIWVRQAPGKGLEWIGMILRAGNIYYASWVKGRFTISRDNSKNTVYLQMNSLRAEDTAVYYCARRHYNREGYPIGIGDLWGQGTLVTVSS

SEQ ID NO: 167 - protein, 114 aa, synthetic construct
DIQMTQSPSSLSASVGDRVTITCQSSESVYNNKRLSWYQQKPGKAPKLLIYTASSLASGVPSRFSGSGSGTDFTLTISSLQPEDFATYYCQGEFTCSNADCFTFGQGTKLTVLG

SEQ ID NO: 168 - protein, 252 aa, synthetic construct
EVQLVESGGGLVQPGGSLRLSCAASGFPLSSYAMIWVRQAPGKGLEWIGMILRAGNIYYASWVKGRFTISRDNSKNTVYLQMNSLRAEDTAVYYCARRHYNREGYPIGIGDLWGQGTLVTVSSGGGGSGGGGSGGGGSDIQMTQSPSSLSASVGDRVTITCQSSESVYNNKRLSWYQQKPGKAPKLLIYTASSLASGVPSRFSGSGSGTDFTLTISSLQPEDFATYYCQGEFTCSNADCFTFGQGTKLTVLG

SEQ ID NO: 169 - protein, 444 aa, synthetic construct
GMRTEDLPKAVVFLEPQWYRVLEKDSVTLKCQGAYSPEDNSTQWFHNESLISSQASSYFIDAATVDDSGEYRCQTNLSTLSDPVQLEVHIGWLLLQAPRWVFKEEDPIHLRCHSWKNTALHKVTYLQNGKGRKYFHHNSDFYIPKATLKDSGSYFCRGLVGSKNVSSETVNITITQGGGGGSGGGGSGGGGSEVQLVESGGGLVQPGGSLRLSCAASGFPLSSYAMIWVRQAPGKGLEWIGMILRAGNIYYASWVKGRFTISRDNSKNTVYLQMNSLRAEDTAVYYCARRHYNREGYPIGIGDLWGQGTLVTVSSGGGGSGGGGSGGGGSDIQMTQSPSSLSASVGDRVTITCQSSESVYNNKRLSWYQQKPGKAPKLLIYTASSLASGVPSRFSGSGSGTDFTLTISSLQPEDFATYYCQGEFTCSNADCFTFGQGTKLTVLG

SEQ ID NO: 170 - protein, 120 aa, synthetic construct
QVQLQESGPELVKPGASVKMSCKASGYKFSSSVMHWVKQKAGQGLEWIGYINPYNDVTKYNGKFKGKATLTSDKSSSTAYMELSSLTSEDSAVYYCARSAYYDYDGIAYWGQGTTVTVSS

SEQ ID NO: 171 - protein, 106 aa, synthetic construct
DIQLTQSPAIMSASPGEKVTMTCSASSSVSYMNWYQQKSGTSPKRWIYDTSKLASGVPARFTGSGSGTSYSLTISNMEAEDAATYYCQQWSSNPPTFGGGTKLEIK

SEQ ID NO: 172 - protein, 241 aa, synthetic construct
QVQLQESGPELVKPGASVKMSCKASGYKFSSSVMHWVKQKAGQGLEWIGYINPYNDVTKYNGKFKGKATLTSDKSSSTAYMELSSLTSEDSAVYYCARSAYYDYDGIAYWGQGTTVTVSSGGGGSGGGGSGGGGSDIQLTQSPAIMSASPGEKVTMTCSASSSVSYMNWYQQKSGTSPKRWIYDTSKLASGVPARFTGSGSGTSYSLTISNMEAEDAATYYCQQWSSNPPTFGGGTKLEIK

SEQ ID NO: 173 - protein, 433 aa, synthetic construct
GMRTEDLPKAVVFLEPQWYRVLEKDSVTLKCQGAYSPEDNSTQWFHNESLISSQASSYFIDAATVDDSGEYRCQTNLSTLSDPVQLEVHIGWLLLQAPRWVFKEEDPIHLRCHSWKNTALHKVTYLQNGKGRKYFHHNSDFYIPKATLKDSGSYFCRGLVGSKNVSSETVNITITQGGGGGSGGGGSGGGGSQVQLQESGPELVKPGASVKMSCKASGYKFSSSVMHWVKQKAGQGLEWIGYINPYNDVTKYNGKFKGKATLTSDKSSSTAYMELSSLTSEDSAVYYCARSAYYDYDGIAYWGQGTTVTVSSGGGGSGGGGSGGGGSDIQLTQSPAIMSASPGEKVTMTCSASSSVSYMNWYQQKSGTSPKRWIYDTSKLASGVPARFTGSGSGTSYSLTISNMEAEDAATYYCQQWSSNPPTFGGGTKLEIK

SEQ ID NO: 174 - protein, 119 aa, synthetic construct
QVQLQQSGAELARPGASVKMSCKASGYTFTSYTMHWVKQRPGQGLEWIGYINPSSGYTNYNQKFKDKATLTADKSSSTAYMQLSSLTSEDSAVYYCARWRDAYYAMDYWGQGTSVTVSS

SEQ ID NO: 175 - protein, 106 aa, synthetic construct
QIVLTQSPAIMSASPGEKVTMTCSASSSVSYMHWYQQKSGTSPKRWIYDTSKLASGVPARFSGSGSGTSYSLTISSMEAEDAATYYCQQWSSNPFTFGSGTKLEIK

SEQ ID NO: 176 - protein, 240 aa, synthetic construct
QVQLQQSGAELARPGASVKMSCKASGYTFTSYTMHWVKQRPGQGLEWIGYINPSSGYTNYNQKFKDKATLTADKSSSTAYMQLSSLTSEDSAVYYCARWRDAYYAMDYWGQGTSVTVSSGGGGSGGGGSGGGGSQIVLTQSPAIMSASPGEKVTMTCSASSSVSYMHWYQQKSGTSPKRWIYDTSKLASGVPARFSGSGSGTSYSLTISSMEAEDAATYYCQQWSSNPFTFGSGTKLEIK

SEQ ID NO: 177 - protein, 432 aa, synthetic construct
GMRTEDLPKAVVFLEPQWYRVLEKDSVTLKCQGAYSPEDNSTQWFHNESLISSQASSYFIDAATVDDSGEYRCQTNLSTLSDPVQLEVHIGWLLLQAPRWVFKEEDPIHLRCHSWKNTALHKVTYLQNGKGRKYFHHNSDFYIPKATLKDSGSYFCRGLVGSKNVSSETVNITITQGGGGGSGGGGSGGGGSQVQLQQSGAELARPGASVKMSCKASGYTFTSYTMHWVKQRPGQGLEWIGYINPSSGYTNYNQKFKDKATLTADKSSSTAYMQLSSLTSEDSAVYYCARWRDAYYAMDYWGQGTSVTVSSGGGGSGGGGSGGGGSQIVLTQSPAIMSASPGEKVTMTCSASSSVSYMHWYQQKSGTSPKRWIYDTSKLASGVPARFSGSGSGTSYSLTISSMEAEDAATYYCQQWSSNPFTFGSGTKLEIK

SEQ ID NO: 178 - protein, 124 aa, synthetic construct
QVQLVQSGAEVKKPGASVKVSCKASGYKFTGFVMHWVRQAPGQGLEWMGFINPYNDDIQSNERFRGRVTMTRDTSISTAYMELSRLRSDDTAVYYCARGNGYNFDGAYRFFDFWGQGTMVTVSS

SEQ ID NO: 179 - protein, 112 aa, synthetic construct
DIVMTQSPLSLPVTPGEPASISCRSSQRLVHSNGNTYLHWYLQKPGQSPRLLIYRVSNRFPGVPDRFSGSGSGTDFTLKISRVEAEDVGVYYCSQSTHVPYTFGQGTKLEIK

SEQ ID NO: 180 - protein, 252 aa, synthetic construct
QVQLVQSGAEVKKPGASVKVSCKASGYKFTGFVMHWVRQAPGQGLEWMGFINPYNDDIQSNERFRGRVTMTRDTSISTAYMELSRLRSDDTAVYYCARGNGYNFDGAYRFFDFWGQGTMVTVSSGGGGGSGGGGSGGGGSDIVMTQSPLSLPVTPGEPASISCRSSQRLVHSNGNTYLHWYLQKPGQSPRLLIYRVSNRFPGVPDRFSGSGSGTDFTLKISRVEAEDVGVYYCSQSTHVPYTFGQGTKLEIK

SEQ ID NO: 181 - protein, 444 aa, synthetic construct
GMRTEDLPKAVVFLEPQWYRVLEKDSVTLKCQGAYSPEDNSTQWFHNESLISSQASSYFIDAATVDDSGEYRCQTNLSTLSDPVQLEVHIGWLLLQAPRWVFKEEDPIHLRCHSWKNTALHKVTYLQNGKGRKYFHHNSDFYIPKATLKDSGSYFCRGLVGSKNVSSETVNITITQGGGGGSGGGGSGGGGSQVQLVQSGAEVKKPGASVKVSCKASGYKFTGFVMHWVRQAPGQGLEWMGFINPYNDDIQSNERFRGRVTMTRDTSISTAYMELSRLRSDDTAVYYCARGNGYNFDGAYRFFDFWGQGTMVTVSSGGGGGSGGGGSGGGGSDIVMTQSPLSLPVTPGEPASISCRSSQRLVHSNGNTYLHWYLQKPGQSPRLLIYRVSNRFPGVPDRFSGSGSGTDFTLKISRVEAEDVGVYYCSQSTHVPYTFGQGTKLEIK

SEQ ID NO: 182 - protein, 120 aa, synthetic construct
QVQLVQSGAEVKKPGASVKVSCKASGYKFTSYVMHWVRQAPGQGLEWIGYINPYNDVTKYNEKFKGRVTITADKSTSTAYLQMNSLRSEDTAVHYCARGSYYDYDGFVYWGQGTLVTVSS

SEQ ID NO: 183 - protein, 106 aa, synthetic construct
EIVLTQSPATLSLSPGERATLSCSATSSVSYMHWYQQKPGKAPKRWIYDTSKLASGVPSRFSGSGSGTEFTLTISSLQPEDFATYYCQQWSSNPLTFGQGTKLEIK

SEQ ID NO: 184 - protein, 434 aa, synthetic construct
GMRTEDLPKAVVFLEPQWYRVLEKDSVTLKCQGAYSPEDNSTQWFHNESLISSQASSYFIDAATVDDSGEYRCQTNLSTLSDPVQLEVHIGWLLLQAPRWVFKEEDPIHLRCHSWKNTALHKVTYLQNGKGRKYFHHNSDFYIPKATLKDSGSYFCRGLVGSKNVSSETVNITITQGGGGGSGGGGSGGGGSQVQLVQSGAEVKKPGASVKVSCKASGYKFTSYVMHWVRQAPGQGLEWIGYINPYNDVTKYNEKFKGRVTITADKSTSTAYLQMNSLRSEDTAVHYCARGSYYDYDGFVYWGQGTLVTVSSGGGGGSGGGGSGGGGSEIVLTQSPATLSLSPGERATLSCSATSSVSYMHWYQQKPGKAPKRWIYDTSKLASGVPSRFSGSGSGTEFTLTISSLQPEDFATYYCQQWSSNPLTFGQGTKLEIK

SEQ ID NO: 185 - protein, 122 aa, synthetic construct
QVQLKQSGPGSVQSSQSLSITCTVSGFSLTTYAVHWVRQSPGKGLEWLGVIWSGGITDYNAAFISRLSITKDDSKSQVFFKMNSLQPNDTAIYYCARNGGDNYPYYYAMDYWGQGTSVTVSS

SEQ ID NO: 186 - protein, 452 aa, synthetic construct
QVQLKQSGPGSVQSSQSLSITCTVSGFSLTTYAVHWVRQSPGKGLEWLGVIWSGGITDYNAAFISRLSITKDDSKSQVFFKMNSLQPNDTAIYYCARNGGDNYPYYYAMDYWGQGTSVTVSSASTKGPSVFPLAPSSKSTSGGTAALGCLVKDYFPEPVTVSWNSGALTSGVHTFPAVLQSSGLYSLSSVVTVPSSSLGTQTYICNVNHKPSNTKVDKKVEPKSCDKTHTCPPCPAPEAAGGPSVFLFPPKPKDTLMISRTPEVTCVVVDVSHEDPEVKFNWYVDGVEVHNAKTKPREEQYNSTYRVVSVLTVLHQDWLNGKEYKCKVSNKALAAPIEKTISKAKGQPREPQVYTLPPSRDELTKNQVSLWCLVKGFYPSDIAVEWESNGQPENNYKTTPPVLDSDGSFFLYSKLTVDKSRWQQGNVFSCSVMHEALHNHYTQKSLSLSPGK

SEQ ID NO: 187 - protein, 112 aa, synthetic construct
DIVMTQAAFSNPVTLGTSASISCRSSKSLLHSNGITYLYWYLQKPGQSPQLLIYQMSNLASGVPDRFSSSGSGTDFTLRISRVEAEDVGVYYCAQNLELPLTFGAGTKLELK

SEQ ID NO: 188 - protein, 219 aa, synthetic construct
DIVMTQAAFSNPVTLGTSASISCRSSKSLLHSNGITYLYWYLQKPGQSPQLLIYQMSNLASGVPDRFSSSGSGTDFTLRISRVEAEDVGVYYCAQNLELPLTFGAGTKLELKRTVAAPSVFIFPPSDEQLKSGTASVVCLLNNFYPREAKVQWKVDNALQSGNSQESVTEQDSKDSTYSLSSTLTLSKADYEKHKVYACEVTHQGLSSPVTKSFNRGEC

SEQ ID NO: 189 - protein, 480 aa, synthetic construct
DIVMTQAAFSNPVTLGTSASISCRSSKSLLHSNGITYLYWYLQKPGQSPQLLIYQMSNLASGVPDRFSSSGSGTDFTLRISRVEAEDVGVYYCAQNLELPLTFGAGTKLELKRTVAAPSVFIFPPSDEQLKSGTASVVCLLNNFYPREAKVQWKVDNALQSGNSQESVTEQDSKDSTYSLSSTLTLSKADYEKHKVYACEVTHQGLSSPVTKSFNRGECGGGGSGGGGGSGGGGGSDIQMTQSPSSLSASVGDRVTITCRASQDIRNYLNWYQQKPGKAPKLLIYYTSRLESGVPSRFSGSGSGTDYTLTISSLQPEDFATYYCQQGNTLPWTFGQGTKVEIKGGGGSGGGGSGGGGSEVQLVESGGGLVQPGGSLRLSCAASGYSFTGYTMNWVRQAPGKGLEWVALINPTKGVSTYNQKFKDRFTISVDKSKNTAYLQMNSLRAEDTAVYYCARSGYYGDSDWYFDVWGQGTLVTVSS

SEQ ID NO: 190 - protein, 121 aa, synthetic construct [sequence omitted]

SEQ ID NO: 191 - protein, 451 aa, synthetic construct
QVQLQQWGAGLLKPSETLSLTCAVYGGSFSGYYWSWIRQSPEKGLEWIGEINHGGYVTYNPSLESRVTISVDTSKNQFSLKLSSVTAADTAVYYCARDYGPGNYDWYFDLWGRGTLVTVSSASTKGPSVFPLAPSSKSTSGGTAALGCLVKDYFPEPVTVSWNSGALTSGVHTFPAVLQSSGLYSLSSVVTVPSSSLGTQTYICNVNHKPSNTKVDKKVEPKSCDKTHTCPPCPAPEAAGGPSVFLFPPKPKDTLMISRTPEVTCVVVDVSHEDPEVKFNWYVDGVEVHNAKTKPREEQYNSTYRVVSVLTVLHQDWLNGKEYKCKVSNKALAAPIEKTISKAKGQPREPQVYTLPPSRDELTKNQVSLWCLVKGFYPSDIAVEWESNGQPENNYKTTPPVLDSDGSFFLYSKLTVDKSRWQQGNVFSCSVMHEALHNHYTQKSLSLSPGK

SEQ ID NO: 192 - protein, 109 aa, synthetic construct
EIVLTQSPATLSLSPGERATLSCRASQSVSSYLAWYQQKPGQAPRLLIYDASNRATGIPARFSGSGSGTDFTLTISSLEPEDFAVYYCQQRSNWPPALTFCGGTKVEIK

SEQ ID NO: 193 - protein, 216 aa, synthetic construct
EIVLTQSPATLSLSPGERATLSCRASQSVSSYLAWYQQKPGQAPRLLIYDASNRATGIPARFSGSGSGTDFTLTISSLEPEDFAVYYCQQRSNWPPALTFCGGTKVEIKRTVAAPSVFIFPPSDEQLKSGTASVVCLLNNFYPREAKVQWKVDNALQSGNSQESVTEQDSKDSTYSLSSTLTLSKADYEKHKVYACEVTHQGLSSPVTKSFNRGEC

SEQ ID NO: 194 - protein, 475 aa, synthetic construct
EIVLTQSPATLSLSPGERATLSCRASQSVSSYLAWYQQKPGQAPRLLIYDASNRATGIPARFSGSGSGTDFTLTISSLEPEDFAVYYCQQRSNWPPALTFCGGTKVEIKRTVAAPSVFIFPPSDEQLKSGTASVVCLLNNFYPREAKVQWKVDNALQSGNSQESVTEQDSKDSTYSLSSTLTLSKADYEKHKVYACEVTHQGLSSPVTKSFNRGECGGGGSGGGGSGGGGSDIQMTQSPSSLSASVGDRVTITCRASQDIRNYLNWYQQKPGKAPKLLIYYTSRLESGVPSRFSGSGSGTDYTLTISSLQPEDFATYYCQQGNTLPWTFGQGTKVEIKGGGGSGGGGSGGGGSEVQLVESGGGLVQPGGSLRLSCAASGYSFTGYTMNWVRQAPGKGLEWVALINPTKGVSTYNQKFKDRFTISVDKSKNTAYLQMNSLRAEDTAVYYCARSGYYGDSDWYFDVWGQGTLVTVSS

SEQ ID NO: 195 - protein, 116 aa, synthetic construct
EVQLVQSGAEVKKPGESLRISCKGSGYSFSTYWISWVRQMPGKGLEWMGKIYPGDSYTNYSPSFQGQVTISADKSISTAYLQWSSLKASDTAMYYCARGYGIFDYWGQGTLVTVSS

SEQ ID NO: 196 - protein, 446 aa, synthetic construct
EVQLVQSGAEVKKPGESLRISCKGSGYSFSTYWISWVRQMPGKGLEWMGKIYPGDSYTNYSPSFQGQVTISADKSISTAYLQWSSLKASDTAMYYCARGYGIFDYWGQGTLVTVSSASTKGPSVFPLAPSSKSTSGGTAALGCLVKDYFPEPVTVSWNSGALTSGVHTFPAVLQSSGLYSLSSVVTVPSSSLGTQTYICNVNHKPSNTKVDKKVEPKSCDKTHTCPPCPAPEAAGGPSVFLFPPKPKDTLMISRTPEVTCVVVDVSHEDPEVKFNWYVDGVEVHNAKTKPREEQYNSTYRVVSVLTVLHQDWLNGKEYKCKVSNKALAAPIEKTISKAKGQPREPQVYTLPPSRDELTKNQVSLWCLVKGFYPSDIAVEWESNGQPENNYKTTPPVLDSDGSFFLYSKLTVDKSRWQQGNVFSCSVMHEALHNHYTQKSLSLSPGK

SEQ ID NO: 197 - protein, 108 aa, synthetic construct
SYELTQPPSVSVSPGQTASITCSGDNIGDQYAHWYQQKPGQSPVLVIYQDKNRPSGIPERFSGSNSGNTATLTISGTQAMDEADYYCATYTGFGSLAVFGGGTKLTVL

SEQ ID NO: 198 - protein, 214 aa, synthetic construct
SYELTQPPSVSVSPGQTASITCSGDNIGDQYAHWYQQKPGQSPVLVIYQDKNRPSGIPERFSGSNSGNTATLTISGTQAMDEADYYCATYTGFGSLAVFGGGTKLTVLGQPKAAPSVTLFPPSSEELQANKATLVCLISDFYPGAVTVAWKADSSPVKAGVETTTPSKQSNNKYAASSYLSLTPEQWKSHRSYSCQVTHEGSTVEKTVAPTECS

SEQ ID NO: 199 - protein, 473 aa, synthetic construct
SYELTQPPSVSVSPGQTASITCSGDNIGDQYAHWYQQKPGQSPVLVIYQDKNRPSGIPERFSGSNSGNTATLTISGTQAMDEADYYCATYTGFGSLAVFGGGTKLTVLGQPKAAPSVTLFPPSSEELQANKATLVCLISDFYPGAVTVAWKADSSPVKAGVETTTPSKQSNNKYAASSYLSLTPEQWKSHRSYSCQVTHEGSTVEKTVAPTECSGGGGSGGGGSGGGGSDIQMTQSPSSLSASVGDRVTITCRASQDIRNYLNWYQQKPGKAPKLLIYYTSRLESGVPSRFSGSGSGTDYTLTISSLQPEDFATYYCQQGNTLPWTFGQGTKVEIKGGGGSGGGGSGGGGSEVQLVESGGGLVQPGGSLRLSCAASGYSFTGYTMNWVRQAPGKGLEWVALINPTKGVSTYNQKFKDRFTISVDKSKNTAYLQMNSLRAEDTAVYYCARSGYYGDSDWYFDVWGQGTLVTVSS

SEQ ID NO: 200 - protein, 119 aa, synthetic construct
QVQLVQSGAEVKKPGASVKVSCKASGYTFSSYWMHWVRQAPGQRLEWMGEINPGNGHTNYSQKFQGRVTITVDKSASTAYMELSSLRSEDTAVYYCARSFTTARAFAYWGQGTLVTVSS

SEQ ID NO: 201 - protein, 449 aa, synthetic construct
QVQLVQSGAEVKKPGASVKVSCKASGYTFSSYWMHWVRQAPGQRLEWMGEINPGNGHTNYSQKFQGRVTITVDKSASTAYMELSSLRSEDTAVYYCARSFTTARAFAYWGQGTLVTVSSASTKGPSVFPLAPSSKSTSGGTAALGCLVKDYFPEPVTVSWNSGALTSGVHTFPAVLQSSGLYSLSSVVTVPSSSLGTQTYICNVNHKPSNTKVDKKVEPKSCDKTHTCPPCPAPEAAGGPSVFLFPPKPKDTLMISRTPEVTCVVVDVSHEDPEVKFNWYVDGVEVHNAKTKPREEQYNSTYRVVSVLTVLHQDWLNGKEYKCKVSNKALAAPIEKTISKAKGQPREPQVYTLPPSRDELTKNQVSLWCLVKGFYPSDIAVEWESNGQPENNYKTTPPVLDSDGSFFLYSKLTVDKSRWQQGNVFSCSVMHEALHNHYTQKSLSLSPGK

SEQ ID NO: 202 - protein, 107 aa, synthetic construct
DIVMTQSPPTLSLSPGERVTLSCRASQSISDYLHWYQQKPGQSPRLLIKYASQSISGIPARFSGSGSGTDFTLTISSLEPEDFAVYYCQDGHSFPPTFGGGTKVEIK

SEQ ID NO: 203 - protein, 214 aa, synthetic construct
DIVMTQSPPTLSLSPGERVTLSCRASQSISDYLHWYQQKPGQSPRLLIKYASQSISGIPARFSGSGSGTDFTLTISSLEPEDFAVYYCQDGHSFPPTFGGGTKVEIKRTVAAPSVFIFPPSDEQLKSGTASVVCLLNNFYPREAKVQWKVDNALQSGNSQESVTEQDSKDSTYSLSSTLTLSKADYEKHKVYACEVTHQGLSSPVTKSFNRGEC

SEQ ID NO: 204 - protein, 473 aa, synthetic construct
DIVMTQSPPTLSLSPGERVTLSCRASQSISDYLHWYQQKPGQSPRLLIKYASQSISGIPARFSGSGSGTDFTLTISSLEPEDFAVYYCQDGHSFPPTFGGGTKVEIKRTVAAPSVFIFPPSDEQLKSGTASVVCLLNNFYPREAKVQWKVDNALQSGNSQESVTEQDSKDSTYSLSSTLTLSKADYEKHKVYACEVTHQGLSSPVTKSFNRGECGGGGSGGGGSGGGGSDIQMTQSPSSLSASVGDRVTITCRASQDIRNYLNWYQQKPGKAPKLLIYYTSRLESGVPSRFSGSGSGTDYTLTISSLQPEDFATYYCQQGNTLPWTFGQGTKVEIKGGGGSGGGGSGGGGSEVQLVESGGGLVQPGGSLRLSCAASGYSFTGYTMNWVRQAPGKGLEWVALINPTKGVSTYNQKFKDRFTISVDKSKNTAYLQMNSLRAEDTAVYYCARSGYYGDSDWYFDVWGQGTLVTVSS

SEQ ID NO: 205 - protein, 116 aa, synthetic construct
QVQLKESGPGLVAPSQSLSITCTVSGFSLTGYGVQPPGKGLEWLGMIWGDGSTDYNSALKSRLSITKDNSKSQVFLKNSLQTDDTARYYCARDGYSNFHYYVMDYWGQGTSVTVSS

SEQ ID NO: 206 - protein, 446 aa, synthetic construct
QVQLKESGPGLVAPSQSLSITCTVSGFSLTGYGVQPPGKGLEWLGMIWGDGSTDYNSALKSRLSITKDNSKSQVFLKNSLQTDDTARYYCARDGYSNFHYYVMDYWGQGTSVTVSSASTKGPSVFPLAPSSKSTSGGTAALGCLVKDYFPEPVTVSWNSGALTSGVHTFPAVLQSSGLYSLSSVVTVPSSSLGTQTYICNVNHKPSNTKVDKKVEPKSCDKTHTCPPCPAPEAAGGPSVFLFPPKPKDTLMISRTPEVTCVVVDVSHEDPEVKFNWYVDGVEVHNAKTKPREEQYNSTYRVVSVLTVLHQDWLNGKEYKCKVSNKALAAPIEKTISKAKGQPREPQVYTLPPSRDELTKNQVSLWCLVKGFYPSDIAVEWESNGQPENNYKTTPPVLDSDGSFFLYSKLTVDKSRWQQGNVFSCSVMHEALHNHYTQKSLSLSPGK

SEQ ID NO: 207 - protein, 112 aa, synthetic construct
DIVLTQSPASLAVSLGQRATLSCRASESVEYYVTSLMQWYQQKIPGQPPKLLISAASNVESGVPARFSGSGSGTDFSLNIHPVEEDDIAMYFCQQSRKVPWTFGGGTKLEIK

SEQ ID NO: 208 - protein, 219 aa, synthetic construct
DIVLTQSPASLAVSLGQRATLSCRASESVEYYVTSLMQWYQQKIPGQPPKLLISAASNVESGVPARFSGSGSGTDFSLNIHPVEEDDIAMYFCQQSRKVPWTFGGGTKLEIKRTVAAPSVFIFPPSDEQLKSGTASVVCLLNNFYPREAKVQWKVDNALQSGNSQESVTEQDSKDSTYSLSSTLTLSKADYEKHKVYACEVTHQGLSSPVTKSFNRGEC

SEQ ID NO: 209 - protein, 478 aa, synthetic construct
DIVLTQSPASLAVSLGQRATLSCRASESVEYYVTSLMQWYQQKIPGQPPKLLISAASNVESGVPARFSGSGSGTDFSLNIHPVEEDDIAMYFCQQSRKVPWTFGGGTKLEIKRTVAAPSVFIFPPSDEQLKSGTASVVCLLNNFYPREAKVQWKVDNALQSGNSQESVTEQDSKDSTYSLSSTLTLSKADYEKHKVYACEVTHQGLSSPVTKSFNRGECGGGGSGGGGSGGGGSDIQMTQSPSSLSASVGDRVTITCRASQDIRNYLNWYQQKPGKAPKLLIYYTSRLESGVPSRFSGSGSGTDYTLTISSLQPEDFATYYCQQGNTLPWTFGQGTKVEIKGGGGSGGGGSGGGGSEVQLVESGGGLVQPGGSLRLSCAASGYSFTGYTMNWVRQAPGKGLEWVALINPTKGVSTYNQKFKDRFTISVDKSKNTAYLQMNSLRAEDTAVYYCARSGYYGDSDWYFDVWGQGTLVTVSS

SEQ ID NO: 210 - protein, 120 aa, synthetic construct
QVQLVQSGAEVKKPGASVKVSCKASGYTFTSYYIHWVRQAPGQGLEWIGCIYPGNVNTNYNEKFKDRATLTVDTSISTAYMELSRLRSDDTAVYFCTRSHYGLDWNFDVWGQGTTVTVSS

SEQ ID NO: 211 - protein, 450 aa, synthetic construct
QVQLVQSGAEVKKPGASVKVSCKASGYTFTSYYIHWVRQAPGQGLEWIGCIYPGNVNTNYNEKFKDRATLTVDTSISTAYMELSRLRSDDTAVYFCTRSHYGLDWNFDVWGQGTTVTVSSASTKGPSVFPLAPSSKSTSGGTAALGCLVKDYFPEPVTVSWNSGALTSGVHTFPAVLQSSGLYSLSSVVTVPSSSLGTQTYICNVNHKPSNTKVDKKVEPKSCDKTHTCPPCPAPEAAGGPSVFLFPPKPKDTLMISRTPEVTCVVVDVSHEDPEVKFNWYVDGVEVHNAKTKPREEQYNSTYRVVSVLTVLHQDWLNGKEYKCKVSNKALAAPIEKTISKAKGQPREPQVYTLPPSRDELTKNQVSLWCLVKGFYPSDIAVEWESNGQPENNYKTTPPVLDSDGSFFLYSKLTVDKSRWQQGNVFSCSVMHEALHNHYTQKSLSLSPGK

SEQ ID NO: 212 - protein, 107 aa, synthetic construct
DIQMTQSPSSLSASVGDRVTITCHASQNIYVWLNWYQQKPGKAPKLLIYKASNLHTGVPSRFSGSGSGTDFTLTISSLQPEDFATYYCQQGQTYPYTFGGGTKVEIK

SEQ ID NO: 213 - protein, 214 aa, synthetic construct
DIQMTQSPSSLSASVGDRVTITCHASQNIYVWLNWYQQKPGKAPKLLIYKASNLHTGVPSRFSGSGSGTDFTLTISSLQPEDFATYYCQQGQTYPYTFGGGTKVEIKRTVAAPSVFIFPPSDEQLKSGTASVVCLLNNFYPREAKVQWKVDNALQSGNSQESVTEQDSKDSTYSLSSTLTLSKADYEKHKVYACEVTHQGLSSPVTKSFNRGEC

SEQ ID NO: 214 - protein, 473 aa, synthetic construct
DIQMTQSPSSLSASVGDRVTITCHASQNIYVWLNWYQQKPGKAPKLLIYKASNLHTGVPSRFSGSGSGTDFTLTISSLQPEDFATYYCQQGQTYPYTFGGGTKVEIKRTVAAPSVFIFPPSDEQLKSGTASVVCLLNNFYPREAKVQWKVDNALQSGNSQESVTEQDSKDSTYSLSSTLTLSKADYEKHKVYACEVTHQGLSSPVTKSFNRGECGGGGSGGGGSGGGGSDIQMTQSPSSLSASVGDRVTITCRASQDIRNYLNWYQQKPGKAPKLLIYYTSRLESGVPSRFSGSGSGTDYTLTISSLQPEDFATYYCQQGNTLPWTFGQGTKVEIKGGGGSGGGGSGGGGSEVQLVESGGGLVQPGGSLRLSCAASGYSFTGYTMNWVRQAPGKGLEWVALINPTKGVSTYNQKFKDRFTISVDKSKNTAYLQMNSLRAEDTAVYYCARSGYYGDSDWYFDVWGQGTLVTVSS

SEQ ID NO: 215 - protein, 120 aa, synthetic construct
QVKLQQSGPGLVTPSQSLSITCTVSGFSLSDYGVHWVRQSPGQGLEWLGVIWAGGGTNYNSALMSRKSISKDNSKSQVFLKMNSLQADDTAVYYCARDKGYSYYYSMDYWGQGTTVTVSS

SEQ ID NO: 216 - protein, 450 aa, synthetic construct
QVKLQQSGPGLVTPSQSLSITCTVSGFSLSDYGVHWVRQSPGQGLEWLGVIWAGGGTNYNSALMSRKSISKDNSKSQVFLKMNSLQADDTAVYYCARDKGYSYYYSMDYWGQGTTVTVSSASTKGPSVFPLAPSSKSTSGGTAALGCLVKDYFPEPVTVSWNSGALTSGVHTFPAVLQSSGLYSLSSVVTVPSSSLGTQTYICNVNHKPSNTKVDKKVEPKSCDKTHTCPPCPAPEAAGGPSVFLFPPKPKDTLMISRTPEVTCVVVDVSHEDPEVKFNWYVDGVEVHNAKTKPREEQYNSTYRVVSVLTVLHQDWLNGKEYKCKVSNKALAAPIEKTISKAKGQPREPQVYTLPPSRDELTKNQVSLWCLVKGFYPSDIAVEWESNGQPENNYKTTPPVLDSDGSFFLYSKLTVDKSRWQQGNVFSCSVMHEALHNHYTQKSLSLSPGK

SEQ ID NO: 217 - protein, 111 aa, synthetic construct
DIELTQSPASLAVSLGQRATISCRASESVEYYVTSLMQWYQQKPGQPPKLLIFAASNVESGVPARFSGSGSGTNFSLNIHPVDEDDVAMYFCQQSRKVPYTFGGGTKLEIK

SEQ ID NO: 218 - protein, 218 aa, synthetic construct
DIELTQSPASLAVSLGQRATISCRASESVEYYVTSLMQWYQQKPGQPPKLLIFAASNVESGVPARFSGSGSGTNFSLNIHPVDEDDVAMYFCQQSRKVPYTFGGGTKLEIKRTVAAPSVFIFPPSDEQLKSGTASVVCLLNNFYPREAKVQWKVDNALQSGNSQESVTEQDSKDSTYSLSSTLTLSKADYEKHKVYACEVTHQGLSSPVTKSFNRGEC

SEQ ID NO: 219 - protein, 477 aa, synthetic construct
DIELTQSPASLAVSLGQRATISCRASESVEYYVTSLMQWYQQKPGQPPKLLIFAASNVESGVPARFSGSGSGTNFSLNIHPVDEDDVAMYFCQQSRKVPYTFGGGTKLEIKRTVAAPSVFIFPPSDEQLKSGTASVVCLLNNFYPREAKVQWKVDNALQSGNSQESVTEQDSKDSTYSLSSTLTLSKADYEKHKVYACEVTHQGLSSPVTKSFNRGECGGGGSGGGGSGGGGSDIQMTQSPSSLSASVGDRVTITCRASQDIRNYLNWYQQKPGKAPKLLIYYTSRLESGVPSRFSGSGSGTDYTLTISSLQPEDFATYYCQQGNTLPWTFGQGTKVEIKGGGGSGGGGSGGGGSEVQLVESGGGLVQPGGSLRLSCAASGYSFTGYTMNWVRQAPGKGLEWVALINPTKGVSTYNQKFKDRFTISVDKSKNTAYLQMNSLRAEDTAVYYCARSGYYGDSDWYFDVWGQGTLVTVSS

SEQ ID NO: 220 - protein, 489 aa, synthetic construct
EVQLQQSGAELVKPGASVKLSCTGSGFNIKDTYIYWLKQRPEQGLEWIGRIDPANGDTEYDPKFQGKATIRADTSSNTAYLQLSSLTSDDTVVYYCARKYGNNRAWFAFWGQGTLVTVSAASTKGPSVFPLAPSSKSTSGGTAALGCLVKDYFPEPVTVSWNSGALTSGVHTFPAVLQSSGLYSLSSVVTVPSSSLGTQTYICNVNHKPSNTKVDKKVEPKSSDKTHTGGGGSGGGGSGGGGSQVKLQQSGPGLVTPSQSLSITCTVSGFSLSDYGVHWVRQSPGQGLEWLGVIWAGGGTNYNSALMSRKSISKDNSKSQVFLKMNSLQADDTAVYYCARDKGYSYYYSMDYWGQGTTVTVSSGGGGSGGGGSGGGGSDIELTQSPASLAVSLGQRATISCRASESVEYYVTSLMQWYQQKPGQPPKLLIFAASNVESGVPARFSGSGSGTNFSLNIHPVDEDDVAMYFCQQSRKVPYTFGGGTKLEIK

SEQ ID NO: 221 - protein, 561 aa, synthetic construct
GMRTEDLPKAVVFLEPQWYRVLEKDSVTLKCQGAYSPEDNSTQWFHNESLISSQASSYFIDAATVDDSGEYRCQTNLSTLSDPVQLEVHIGWLLLQAPRWVFKEEDPIHLRCHSWKNTALHKVTYLQNGKGRKYFHHNSDFYIPKATLKDSGSYFCRGLVGSKNVSSETVNITITQGGGGGSGGGGSGGGGSASTKGPSVFPLAPSSKSTSGGTAALGCLVKDYFPEPVTVSWNSGALTSGVHTCPAVLQSSGLYSLSSVVTVPSSSLGTQTYICNVNHKPSNTKVDKKVEPKSSDKTHTGGGGSGGGGSGGGGSQVKLQQSGPGLVTPSQSLSITCTVSGFSLSDYGVHWVRQSPGQGLEWLGVIWAGGGTNYNSALMSRKSISKDNSKSQVFLKMNSLQADDTAVYYCARDKGYSYYYSMDYWGQGTTVTVSSGGGGSGGGGSGGGGSDIELTQSPASLAVSLGQRATISCRASESVEYYVTSLMQWYQQKPGQPPKLLIFAASNVESGVPARFSGSGSGTNFSLNIHPVDEDDVAMYFCQQSRKVPYTFGGGTKLEIK

SEQ ID NO: 222 - protein, 125 aa, synthetic construct
EVQLVESGGGLVQPGGSLRLSCAASGYSFTGHWMNWVRQAPGKGLEWVGIMIHPSDSETRYNQKFKDIRFTISVDKSKNTLYLQMNSLRAEDTAVYYCARIGIYFYGTTYFDYIWGQGTLVTVSS

SEQ ID NO: 223 - protein, 455 aa, synthetic construct
EVQLVESGGGLVQPGGSLRLSCAASGYSFTGHWMNWVRQAPGKGLEWVGIMIHPSDSETRYNQKFKDIRFTISVDKSKNTLYLQMNSLRAEDTAVYYCARIGIYFYGTTYFDYIWGQGTLVTVSSASTKGPSVFPLAPSSKSTSGGTAALGCLVKDYFPEPVTVSWNSGALTSGVHTFPAVLQSSGLYSLSSVVTVPSSSLGTQTYICNVNHKPSNTKVDKKVEPKSCDKTHTCPPCPAPEAAGGPSVFLFPPKPKDTLMISRTPEVTCVVVDVSHEDPEVKFNWYVDGVEVHNAKTKPREEQYNSTYRVVSVLTVLHQDWLNGKEYKCKVSNKALAAPIEKTISKAKGQPREPQVYTLPPSRDELTKNQVSLWCLVKGFYPSDIAVEWESNGQPENNYKTTPPVLDSDGSFFLYSKLTVDKSRWQQGNVFSCSVMHEALHNHYTQKSLSLSPGK

SEQ ID NO: 224 - protein, 107 aa, synthetic construct
DIQMTQSPSSLSASVGDRVTITCRASKTISKYLAWXQQKPGKAPKLLIYSGSTLQSGVPSRFSGSGSGTDFTLTISSLQPEDFATYYCQQHNEYPLTFGQGTKVEIK

SEQ ID NO: 225 - protein, 214 aa, synthetic construct
DIQMTQSPSSLSASVGDRVTITCRASKTISKYLAWXQQKPGKAPKLLIYSGSTLQSGVPSRFSGSGSGTDFTLTISSLQPEDFATYYCQQHNEYPLTFGQGTKVEIKRTVAAPSVFIFPPSDEQLKSGTASVVCLLNNFYPREAKVQWKVDNALQSGNSQESVTEQDSKDSTYSLSSTLTLSKADYEKHKVYACEVTHQGLSSPVTKSFNRGEC

SEQ ID NO: 226 - protein, 473 aa, synthetic construct
DIQMTQSPSSLSASVGDRVTITCRASKTISKYLAWXQQKPGKAPKLLIYSGSTLQSGVPSRFSGSGSGTDFTLTISSLQPEDFATYYCQQHNEYPLTFGQGTKVEIKRTVAAPSVFIFPPSDEQLKSGTASVVCLLNNFYPREAKVQWKVDNALQSGNSQESVTEQDSKDSTYSLSSTLTLSKADYEKHKVYACEVTHQGLSSPVTKSFNRGECGGGGSGGGGSGGGGSDIQMTQSPSSLSASVGDRVTITCRASQDIRNYLNWYQQKPGKAPKLLIYYTSRLESGVPSRFSGSGSGTDYTLTISSLQPEDFATYYCQQGNTLPWTFGQGTKVEIKGGGGSGGGGSGGGGSEVQLVESGGGLVQPGGSLRLSCAASGYSFTGYTMNWVRQAPGKGLEWVALINPTKGVSTYNQKFKDRFTISVDKSKNTAYLQMNSLRAEDTAVYYCARSGYYGDSDWYFDVWGQGTLVTVSS

SEQ ID NO: 227 - protein, 124 aa, synthetic construct
EVQLVESGGGLVQPGGSLRLSCATSGYTFTEYTMHWMRQAPGKGLEWVAGINPKNGGTSHNQRFMDRFTISVDKSTSTAYMQMNSLRAEDTAVYYCARWRGLNYGFDVRYFDVWGQGTLVTVSS

SEQ ID NO: 228 - protein, 454 aa, synthetic construct
EVQLVESGGGLVQPGGSLRLSCATSGYTFTEYTMHWMRQAPGKGLEWVAGINPKNGGTSHNQRFMDRFTISVDKSTSTAYMQMNSLRAEDTAVYYCARWRGLNYGFDVRYFDVWGQGTLVTVSSASTKGPSVFPLAPSSKSTSGGTAALGCLVKDYFPEPVTVSWNSGALTSGVHTFPAVLQSSGLYSLSSVVTVPSSSLGTQTYICNVNHKPSNTKVDKKVEPKSCDKTHTCPPCPAPEAAGGPSVFLFPPKPKDTLMISRTPEVTCVVVDVSHEDPEVKFNWYVDGVEVHNAKTKPREEQYNSTYRVVSVLTVLHQDWLNGKEYKCKVSNKALAAPIEKTISKAKGQPREPQVYTLPPSRDELTKNQVSLWCLVKGFYPSDIAVEWESNGQPENNYKTTPPVLDSDGSFFLYSKLTVDKSRWQQGNVFSCSVMHEALHNHYTQKSLSLSPGK

SEQ ID NO: 229 - protein, 107 aa, synthetic construct
DIQMTQSPSSLSASVGDRVTITCRASQDINNYLNWYQQKPGKAPKLLIYYTSTLHSGVPSRFSGSGSGTDYTLTISSLQPEDFATYYCQQGNTLPPTFGQGTKVEIK

SEQ ID NO: 230 - protein, 214 aa, synthetic construct
DIQMTQSPSSLSASVGDRVTITCRASQDINNYLNWYQQKPGKAPKLLIYYTSTLHSGVPSRFSGSGSGTDYTLTISSLQPEDFATYYCQQGNTLPPTFGQGTKVEIKRTVAAPSVFIFPPSDEQLKSGTASVVCLLNNFYPREAKVQWKVDNALQSGNSQESVTEQDSKDSTYSLSSTLTLSKADYEKHKVYACEVTHQGLSSPVTKSFNRGEC

SEQ ID NO: 231 - protein, 473 aa, synthetic construct
DIQMTQSPSSLSASVGDRVTITCRASQDINNYLNWYQQKPGKAPKLLIYYTSTLHSGVPSRFSGSGSGTDYTLTISSLQPEDFATYYCQQGNTLPPTFGQGTKVEIKRTVAAPSVFIFPPSDEQLKSGTASVVCLLNNFYPREAKVQWKVDNALQSGNSQESVTEQDSKDSTYSLSSTLTLSKADYEKHKVYACEVTHQGLSSPVTKSFNRGECGGGGSGGGGSGGGGSDIQMTQSPSSLSASVGDRVTITCRASQDIRNYLNWYQQKPGKAPKLLIYYTSRLESGVPSRFSGSGSGTDYTLTISSLQPEDFATYYCQQGNTLPWTFGQGTKVEIKGGGGSGGGGSGGGGSEVQLVESGGGLVQPGGSLRLSCAASGYSFTGYTMNWVRQAPGKGLEWVALINPTKGVSTYNQKFKDRFTISVDKSKNTAYLQMNSLRAEDTAVYYCARSGYYGDSDWYFDVWGQGTLVTVSS

SEQ ID NO: 232 - protein, 119 aa, synthetic construct
QVQLVESGGGVVQPGRSLRLSCAASGFTFSSYVLHWVRQAPGKGLDWVAVISDDGRNKYFADSVKGRFTISRDNSKNTLYLQMNSLRAEDTAVYYCVREGYSGSWFDYWGQGTLVTVSS

SEQ ID NO: 233 - protein, 107 aa, synthetic construct
AIQLTQSPSSLSASVGDRVTITCRASQGISSALAWYQQKPGKAPKLLIYGASSLEGGVPSRFSGSGSGTDFTLTISSLQPEDFATYYCQQFNSYPFTFGPGTKVDIK

SEQ ID NO: 234 - protein, 241 aa, synthetic construct
QVQLVESGGGVVQPGRSLRLSCAASGFTFSSYVLHWVRQAPGKGLDWVAVISDDGRNKYFADSVKGRFTISRDNSKNTLYLQMNSLRAEDTAVYYCVREGYSGSWFDYWGQGTLVTVSSGGGGSGGGGSGGGGSAIQLTQSPSSLSASVGDRVTITCRASQGISSALAWYQQKPGKAPKLLIYGASSLEGGVPSRFSGSGSGTDFTLTISSLQPEDFATYYCQQFNSYPFTFGPGTKVDIK

SEQ ID NO: 235 - protein, 433 aa, synthetic construct
GMRTEDLPKAVVFLEPQWYRVLEKDSVTLKCQGAYSPEDNSTQWFHNESLISSQASSYFIDAATVDDSGEYRCQTNLSTLSDPVQLEVHIGWLLLQAPRWVFKEEDPIHLRCHSWKNTALHKVTYLQNGKGRKYFHHNSDFYIPKATLKDSGSYFCRGLVGSKNVSSETVNITITQGGGGGSGGGGSGGGGSQVQLVESGGGVVQPGRSLRLSCAASGFTFSSYVLHWVRQAPGKGLDWVAVISDDGRNKYFADSVKGRFTISRDNSKNTLYLQMNSLRAEDTAVYYCVREGYSGSWFDYWGQGTLVTVSSGGGGSGGGGSGGGGSAIQLTQSPSSLSASVGDRVTITCRASQGISSALAWYQQKPGKAPKLLIYGASSLEGGVPSRFSGSGSGTDFTLTISSLQPEDFATYYCQQFNSYPFTFGPGTKVDIK

SEQ ID NO: 236 - protein, 123 aa, synthetic construct
EIQLQQTGPELVKPGASVKISCKASGYSFTDYIIFWVKQSHGKSLEWTGNINPYYGSTSYNLKFKGKATLTVDKSSSTAYMQLNSLTSEDSAVYYCVRGVYYYGSSYEAFPYWGQGTLVTVSA

SEQ ID NO: 237 - protein, 112 aa, synthetic construct
DIQLTQSPLTLSITIGQPASISCKSSQSLLDSDGKTYLNWLLQRPGQSPTRLIYLVSKLDSGVPDRFTGSGSGTDFTLKISRVEAEDLGIYYCWQGAHFPQTFGGGTKLEIK

SEQ ID NO: 238 - protein, 250 aa, synthetic construct
DIQLTQSPLTLSITIGQPASISCKSSQSLLDSDGKTYLNWLLQRPGQSPTRLIYLVSKLDSGVPDRFTGSGSGTDFTLKISRVEAEDLGIYYCWQGAHFPQTFGGGTKLEIKGGGGSGGGGSGGGGSEIQLQQTGPELVKPGASVKISCKASGYSFTDYIIFWVKQSHGKSLEWTGNINPYYGSTSYNLKFKGKATLTVDKSSSTAYMQLNSLTSEDSAVYYCVRGVYYYGSSYEAFPYWGQGTLVTVSA

SEQ ID NO: 239 - protein, 442 aa, synthetic construct
GMRTEDLPKAVVFLEPQWYRVLEKDSVTLKCQGAYSPEDNSTQWFHNESLISSQASSYFIDAATVDDSGEYRCQTNLSTLSDPVQLEVHIGWLLLQAPRWVFKEEDPIHLRCHSWKNTALHKVTYLQNGKGRKYFHHNSDFYIPKATLKDSGSYFCRGLVGSKNVSSETVNITITQGGGGGSGGGGSGGGGSDIQLTQSPLTLSITIGQPASISCKSSQSLLDSDGKTYLNWLLQRPGQSPTRLIYLVSKLDSGVPDRFTGSGSGTDFTLKISRVEAEDLGIYYCWQGAHFPQTFGGGTKLEIKGGGGSGGGGSGGGGSEIQLQQTGPELVKPGASVKISCKASGYSFTDYIIFWVKQSHGKSLEWTGNINPYYGSTSYNLKFKGKATLTVDKSSSTAYMQLNSLTSEDSAVYYCVRGVYYYGSSYEAFPYWGQGTLVTVSA

SEQ ID NO: 240 - protein, 119 aa, synthetic construct
QVQLVESGGGVVQPGRSLRLSCAASGFTFSSYAMHWVRQAPGKGLEWVAVISYDGRNKDYADSVKGRFTISRDNSKNTLYLQMNSLRAEDTAVHYCARLDWGYDAFDIWGQGTMVTVSS

SEQ ID NO: 241 - protein, 109 aa, synthetic construct
EIVLTQSPGTLSLSPGERATLSCRASQSVSSSYLAWYQQKPGQAPRLLIYGASSRATGIPDRFSGSGSGTDFTLTISRLEPEDFAVYYCQQYGSSPPYTFGQGTKLEIK

SEQ ID NO: 242 - protein, 243 aa, synthetic construct
QVQLVESGGGVVQPGRSLRLSCAASGFTFSSYAMHWVRQAPGKGLEWVAVISYDGRNKDYADSVKGRFTISRDNSKNTLYLQMNSLRAEDTAVHYCARLDWGYDAFDIWGQGTMVTVSSGGGGSGGGGSGGGGSEIVLTQSPGTLSLSPGERATLSCRASQSVSSSYLAWYQQKPGQAPRLLIYGASSRATGIPDRFSGSGSGTDFTLTISRLEPEDFAVYYCQQYGSSPPYTFGQGTKLEIK

SEQ ID NO: 243 - protein, 435 aa, synthetic construct
GMRTEDLPKAVVFLEPQWYRVLEKDSVTLKCQGAYSPEDNSTQWFHNESLISSQASSYFIDAATVDDSGEYRCQTNLSTLSDPVQLEVHIGWLLLQAPRWVFKEEDPIHLRCHSWKNTALHKVTYLQNGKGRKYFHHNSDFYIPKATLKDSGSYFCRGLVGSKNVSSETVNITITQGGGGGSGGGGSGGGGSQVQLVESGGGVVQPGRSLRLSCAASGFTFSSYAMHWVRQAPGKGLEWVAVISYDGRNKDYADSVKGRFTISRDNSKNTLYLQMNSLRAEDTAVHYCARLDWGYDAFDIWGQGTMVTVSSGGGGSGGGGSGGGGSEIVLTQSPGTLSLSPGERATLSCRASQSVSSSYLAWYQQKPGQAPRLLIYGASSRATGIPDRFSGSGSGTDFTLTISRLEPEDFAVYYCQQYGSSPPYTFGQGTKLEIK

SEQ ID NO: 244 - protein, 121 aa, synthetic construct
QIQLVQSGPELKKPGETVRISCKASGYAFTTTGMQWVQEMPGKGLKWIGWINTPLWSAKICRRLQGRFAFSLETSANTAYLQISNLKDEDTATYFCVRSGNGNYDLAYFAYWGQGTLVTVS

SEQ ID NO: 245 - protein, 107 aa, synthetic construct
DIVLTQSPATLSVTPGDRVSLSCPASQSISDYLHWYOQKSHESPRLLIKYASHSISGIPSRFSGSGSGSDFTLSTNSVEPEDVGIYYCQHGHSFPWTFGGGTKLEIK

SEQ ID NO: 246 - protein, 243 aa, synthetic construct
QIQLVQSGPELKKPGETVRISCKASGYAFTTTGMQWVQEMPGKGLKWIGWINTPLWSAKICRRLQGRFAFSLETSANTAYLQISNLKDEDTATYFCVRSGNGNYDLAYFAYWGQGTLVTVSGGGGSGGGGSGGGGSDIVLTQSPATLSVTPGDRVSLSCPASQSISDYLHWYOQKSHESPRLLIKYASHSISGIPSRFSGSGSGSDFTLSTNSVEPEDVGIYYCQHGHSFPWTFGGGTKLEIK

SEQ ID NO: 247 - protein, 435 aa, synthetic construct
GMRTEDLPKAVVFLEPQWYRVLEKDSVTLKCQGAYSPEDNSTQWFHNESLISSQASSYFIDAATVDDSGEYRCQTNLSTLSDPVQLEVHIGWLLLQAPRWVFKEEDPIHLRCHSWKNTALHKVTYLQNGKGRKYFHHNSDFYIPKATLKDSGSYFCRGLVGSKNVSSETVNITITQGGGGGSGGGGSGGGGSQIQLVQSGPELKKPGETVRISCKASGYAFTTTGMQWVQEMPGKGLKWIGWINTPLWSAKICRRLQGRFAFSLETSANTAYLQISNLKDEDTATYFCVRSGNGNYDLAYFAYWGQGTLVTVSGGGGSGGGGSGGGGSDIVLTQSPATLSVTPGDRVSLSCPASQSISDYLHWYOQKSHESPRLLIKYASHSISGIPSRFSGSGSGSDFTLSTNSVEPEDVGIYYCQHGHSFPWTFGGGTKLEIK

SEQ ID NO: 248 - protein, 149 aa, synthetic construct
MQKGDQNPQIAAHVISEASSKTTSVLQWAEKGYYTMSNNLVTLENGKQLTVKRQGLYYIYAQVTFCSNREASSQAPFIASLCLKSPGRFERILLRAANTHSSAKPCGQQSIHLGGVFELQPGASVFVNVTDPSQVSHGTGFTSFGLLKL

SEQ ID NO: 249 - protein, 341 aa, synthetic construct
GMRTEDLPKAVVFLEPQWYRVLEKDSVTLKCQGAYSPEDNSTQWFHNESLISSQASSYFIDAATVDDSGEYRCQTNLSTLSDPVQLEVHIGWLLLQAPRWVFKEEDPIHLRCHSWKNTALHKVTYLQNGKGRKYFHHNSDFYIPKATLKDSGSYFCRGLVGSKNVSSETVNITITQGGGGGSGGGGSGGGGSMQKGDQNPQIAAHVISEASSKTTSVLQWAEKGYYTMSNNLVTLENGKQLTVKRQGLYYIYAQVTFCSNREASSQAPFIASLCLKSPGRFERILLRAANTHSSAKPCGQQSIHLGGVFELQPGASVFVNVTDPSQVSHGTGFTSFGLLKL

SEQ ID NO: 250 - protein, 116 aa, synthetic construct
EVQLQQSGAELMKPGASVKISCKATGYTFSSYWIEWVKQRPGHGLEWIGEILPGGGDTNYNEIFKGKATFTDTSSNTAYMQLSSLTSEDSAVYYCTRRVPVYFDYWGQGTSVTVSS

SEQ ID NO: 251 - protein, 111 aa, synthetic construct
DIVLTQSPASLAVSLGQRATISCKASQSVDYDGDSFLNWYQQKPGQPPKLFIYAASNLESGIPARFSGSGSGTDFTLNIHPVEEEDAATYYCQQSNEDPLTFGAGTELELK

SEQ ID NO: 252 - protein, 434 aa, synthetic construct
GMRTEDLPKAVVFLEPQWYRVLEKDSVTLKCQGAYSPEDNSTQWFHNESLISSQASSYFIDAATVDDSGEYRCQTNLSTLSDPVQLEVHIGWLLLQAPRWVFKEEDPIHLRCHSWKNTALHKVTYLQNGKGRKYFHHNSDFYIPKATLKDSGSYFCRGLVGSKNVSSETVNITITQGGGGGSGGGGSGGGGSEVQLQQSGAELMKPGASVKISCKATGYTFSSYWIEWVKQRPGHGLEWIGEILPGGGDTNYNEIFKGKATFTDTSSNTAYMQLSSLTSEDSAVYYCTRRVPVYFDYWGQGTSVTVSSGGGGSGGGGSGGGGSDIVLTQSPASLAVSLGQRATISCKASQSVDYDGDSFLNWYQQKPGQPPKLFIYAASNLESGIPARFSGSGSGTDFTLNIHPVEEEDAATYYCQQSNEDPLTFGAGTELELK

SEQ ID NO: 253 - protein, 434 aa, synthetic construct; identical to SEQ ID NO: 252

SEQ ID NO: 254 - protein, 116 aa, synthetic construct
EVQLVESGGGLVQPGGSLRLSCAASGYTFSSYWIEWVRQAPGKGLEWIGEILPGGGDTNYNEIFKGRATFSADTSKNTAYLQMSLRAEDTAVYYCTRRVPIRLDYWGQGTLVTVSS

SEQ ID NO: 255 - protein, 111 aa, synthetic construct [sequence omitted]

SEQ ID NO: 256 - protein, 242 aa, synthetic construct
EVQLVESGGGLVQPGGSLRLSCAASGYTFSSYWIEWVRQAPGKGLEWIGEILPGGGDTNYNEIFKGRATFSADTSKNTAYLQMSLRAEDTAVYYCTRRVPIRLDYWGQGTLVTVSSGGGGSGGGGSGGGGSDIQLTQSPSSLSASVGDRVTITCKASQSVDYEGDSFLNWYQQKPGKAPKLLIYAASNLESGVPSRFSGSGSGTDFTLTISSLQPEDFATYYCQQSNEDPLTFGQGTKVEIK

SEQ ID NO: 257 - protein, 434 aa, synthetic construct
GMRTEDLPKAVVFLEPQWYRVLEKDSVTLKCQGAYSPEDNSTQWFHNESLISSQASSYFIDAATVDDSGEYRCQTNLSTLSDPVQLEVHIGWLLLQAPRWVFKEEDPIHLRCHSWKNTALHKVTYLQNGKGRKYFHHNSDFYIPKATLKDSGSYFCRGLVGSKNVSSETVNITITQGGGGGSGGGGSGGGGSEVQLVESGGGLVQPGGSLRLSCAASGYTFSSYWIEWVRQAPGKGLEWIGEILPGGGDTNYNEIFKGRATFSADTSKNTAYLQMSLRAEDTAVYYCTRRVPIRLDYWGQGTLVTVSSGGGGSGGGGSGGGGSDIQLTQSPSSLSASVGDRVTITCKASQSVDYEGDSFLNWYQQKPGKAPKLLIYAASNLESGVPSRFSGSGSGTDFTLTISSLQPEDFATYYCQQSNEDPLTFGQGTKVEIK

SEQ ID NO: 258 - protein, 120 aa, synthetic construct
QVQLVQSGAEVKKPGSSVKVSCKASGYTFSDYVINWVRQAPGQGLEWMGEIYPGSGTNYYNEKFKAKATITADKSTSTAYMELSSLRSEDTAVYYCARRGRYGLYAMDYWGQGTTVTVSS

SEQ ID NO: 259 - protein, 107 aa, synthetic construct
DIQMTQSPSSLSASVGDRVTITCRASQDISNYLNWYQQKPGKAPKLLIYYTSRLHSGVPSRFSGSGSGTDFTFTISSLQPEDIATYFCQQGNTRPWTFGGGTKVEIK

SEQ ID NO: 260 - protein, 242 aa, synthetic construct
QVQLVQSGAEVKKPGSSVKVSCKASGYTFSDYVINWVRQAPGQGLEWMGEIYPGSGTNYYNEKFKAKATITADKSTSTAYMELSSLRSEDTAVYYCARRGRYGLYAMDYWGQGTTVTVSSGGGGSGGGGSGGGGSDIQMTQSPSSLSASVGDRVTITCRASQDISNYLNWYQQKPGKAPKLLIYYTSRLHSGVPSRFSGSGSGTDFTFTISSLQPEDIATYFCQQGNTRPWTFGGGTKVEIK

SEQ ID NO: 261 - protein, 434 aa, synthetic construct
GMRTEDLPKAVVFLEPQWYRVLEKDSVTLKCQGAYSPEDNSTQWFHNESLISSQASSYFIDAATVDDSGEYRCQTNLSTLSDPVQLEVHIGWLLLQAPRWVFKEEDPIHLRCHSWKNTALHKVTYLQNGKGRKYFHHNSDFYIPKATLKDSGSYFCRGLVGSKNVSSETVNITITQGGGGGSGGGGSGGGGSQVQLVQSGAEVKKPGSSVKVSCKASGYTFSDYVINWVRQAPGQGLEWMGEIYPGSGTNYYNEKFKAKATITADKSTSTAYMELSSLRSEDTAVYYCARRGRYGLYAMDYWGQGTTVTVSSGGGGSGGGGSGGGGSDIQMTQSPSSLSASVGDRVTITCRASQDISNYLNWYQQKPGKAPKLLIYYTSRLHSGVPSRFSGSGSGTDFTFTISSLQPEDIATYFCQQGNTRPWTFGGGTKVEIK

SEQ ID NO: 262 - protein, 117 aa, synthetic construct
QVQLVQSGAEVKKPGASVKVSCKASGYTFTSFTMHWVRQAPGQGLEWIGYINPSSGYTEYNQKFKDRVTITADKSTSTAYMELSSLRSEDTAVYYCVRGSSRGFDYWGQGTLVTVSS

SEQ ID NO: 263 - protein, 107 aa, synthetic construct
DIQMTQSPSSLSASVGDRVTITCRASENIYSNLAWFQQKPGKAPKLLVYAATNLADGVPSRFSGSGSGTDYTLTISSLQPEDFATYYCQHFWGTPRTFGGGTKVEIK

SEQ ID NO: 264 - protein, 239 aa, synthetic construct
QVQLVQSGAEVKKPGASVKVSCKASGYTFTSFTMHWVRQAPGQGLEWIGYINPSSGYTEYNQKFKDRVTITADKSTSTAYMELSSLRSEDTAVYYCVRGSSRGFDYWGQGTLVTVSSGGGGSGGGGSGGGGSDIQMTQSPSSLSASVGDRVTITCRASENIYSNLAWFQQKPGKAPKLLVYAATNLADGVPSRFSGSGSGTDYTLTISSLQPEDFATYYCQHFWGTPRTFGGGTKVEIK

SEQ ID NO: 265 - protein, 431 aa, synthetic construct
GMRTEDLPKAVVFLEPQWYRVLEKDSVTLKCQGAYSPEDNSTQWFHNESLISSQASSYFIDAATVDDSGEYRCQTNLSTLSDPVQLEVHIGWLLLQAPRWVFKEEDPIHLRCHSWKNTALHKVTYLQNGKGRKYFHHNSDFYIPKATLKDSGSYFCRGLVGSKNVSSETVNITITQGGGGGSGGGGSGGGGSQVQLVQSGAEVKKPGASVKVSCKASGYTFTSFTMHWVRQAPGQGLEWIGYINPSSGYTEYNQKFKDRVTITADKSTSTAYMELSSLRSEDTAVYYCVRGSSRGFDYWGQGTLVTVSSGGGGSGGGGSGGGGSDIQMTQSPSSLSASVGDRVTITCRASENIYSNLAWFQQKPGKAPKLLVYAATNLADGVPSRFSGSGSGTDYTLTISSLQPEDFATYYCQHFWGTPRTFGGGTKVEIK

SEQ ID NO: 266 - protein, 585 aa, synthetic construct [sequence omitted]

SEQ ID NO: 267 - protein, 758 aa, synthetic construct
EVQLVESGGGLVQPGNSLRLSCAASGFTFSSFGMSWVRQAPGKGLEWVSSISGSGSDTLYADSVKGRFTISRDNAKTTLYLQMNSLRPEDTAVYYCTIGGSLSRSSQGTLVTVSSGGGGSGGGGSGGGGSGMRTEDLPKAVVFLEPQWYRVLEKDSVTLKCQGAYSPEDNSTQWFHNESLISSQASSYFIDAATVDDSGEYRCQTNLSTLSDPVQLEVHIGWLLLQAPRWVFKEEDPIHLRCHSWKNTALHKVTYLQNGKGRKYFHHNSDFYIPKATLKDSGSYFCRGLVGSKNVSSETVNITITQGGGGGSGGGGSGGGGSDIQMTQSPSSLSASVGDRVTITCRASQDIRNYLNWYQQKPGKAPKLLIYYTSRLESGVPSRFSGSGSGTDYTLTISSLQPEDFATYYCQQGNTLPWTFGQGTKVEIKGGGGSGGGGSGGGGSEVQLVESGGGLVQPGGSLRLSCAASGYSFTGYTMNWVRQAPGKGLEWVALINPTKGVSTYNQKFKDRFTISVDKSKNTAYLQMNSLRAEDTAVYYCARSGYYGDSDWYFDVWGQGTLVTVSSGGGGSGGGGSGGGGSGMRTEDLPKAVVFLEPQWYRVLEKDSVTLKCQGAYSPEDNSTQWFHNESLISSQASSYFIDAATVDDSGEYRCQTNLSTLSDPVQLEVHIGWLLLQAPRWVFKEEDPIHLRCHSWKNTALHKVTYLQNGKGRKYFHHNSDFYIPKATLKDSGSYFCRGLVGSKNVSSETVNITITQG

SEQ ID NO: 268 - protein, 1036 aa, synthetic construct
DAHKSEVAHRFKDLGEENFKALVLIAFAQYLQQCPFEDHVKLVNEVTEFAKTCVADESAENCDKSLHTLFGDKLCTVATLRETYGEMADCCAKQEPERNECFLQHKDDNPNLPRLVRPEVDVMCTAFHDNEETFLKKYLYEIARRHPYFYAPELLFFAKRYKAAFTECCQAADKAACLLPKLDELRDEGKASSAKQRLKCASLQKFGERAFKAWAVARLSQRFPKAEFAEVSKLVTDLTKVHTECCHGDLLECADDRADLAKYICENQDSISSKLKECCEKPLLEKSHCIAEVENDEMPADLPSLAADFVESKDVCKNYAEAKDVFLGMFLYEYARRHPDYSVVLLLRLAKTYETTLEKCCAAADPHECYAKVFDEFKPLVEEPQNLIKQNCELFEQLGEYKFQNALLVRYTKKVPQVSTPTLVEVSRNLGKVGSKCCKHPEAKRMPCAEDYLSVVLNQLCVLHEKTPVSDRVTKCCTESLVNRRPCFSALEVDETYVPKEFNAETFTFHADICTLSEKERQIKKQTALVELVKHKPKATKEQLKAVMDDFAAFVEKCCKADDKETCFAEEGKKLVAASQAALGLGGGGSGGGGSGGGGSGMRTEDLPKAVVFLEPQWYRVLEKDSVTLKCQGAYSPEDNSTQWFHNESLISSQASSYFIDAATVDDSGEYRCQTNLSTLSDPVQLEVHIGWLLLQAPRWVFKEEDPIHLRCHSWKNTALHKVTYLQNGKGRKYFHHNSDFYIPKATLKDSGSYFCRGLVGSKNVSSETVNITITQGGGGGSGGGGSGGGGSDIQMTQSPSSLSASVGDRVTITCRASQDIRNYLNWYQQKPGKAPKLLIYYTSRLESGVPSRFSGSGSGTDYTLTISSLQPEDFATYYCQQGNTLPWTFGQGTKVEIKGGGGSGGGGSGGGGSEVQLVESGGGLVQPGGSLRLSCAASGYSFTGYTMNWVRQAPGKGLEWVALINPTKGVSTYNQKFKDRFTISVDKSKNTAYLQMNSLRAEDTAVYYCARSGYYGDSDWYFDVWGQGTLVTVSS

SEQ ID NO: 269 - protein, 1213 aa, synthetic construct
DAHKSEVAHRFKDLGEENFKALVLIAFAQYLQQCPFEDHVKLVNEVTEFAKTCVADESAENCDKSLHTLFGDKLCTVATLRETYGEMADCCAKQEPERNECFLQHKDDNPNLPRLVRPEVDVMCTAFHDNEETFLKKYLYEIARRHPYFYAPELLFFAKRYKAAFTECCQAADKAACLLPKLDELRDEGKASSAKQRLKCASLQKFGERAFKAWAVARLSQRFPKAEFAEVSKLVTDLTKVHTECCHGDLLECADDRADLAKYICENQDSISSKLKECCEKPLLEKSHCIAEVENDEMPADLPSLAADFVESKDVCKNYAEAKDVFLGMFLYEYARRHPDYSVVLLLRLAKTYETTLEKCCAAADPHECYAKVFDEFKPLVEEPQNLIKQNCELFEQLGEYKFQNALLVRYTKKVPQVSTPTLVEVSRNLGKVGSKCCKHPEAKRMPCAEDYLSVVLNQLCVLHEKTPVSDRVTKCCTESLVNRRPCFSALEVDETYVPKEFNAETFTFHADICTLSEKERQIKKQTALVELVKHKPKATKEQLKAVMDDFAAFVEKCCKADDKETCFAEEGKKLVAASQAALGLGGGGSGGGGSGGGGSGMRTEDLPKAVVFLEPQWYRVLEKDSVTLKCQGAYSPEDNSTQWFHNESLISSQASSYFIDAATVDDSGEYRCQTNLSTLSDPVQLEVHIGWLLLQAPRWVFKEEDPIHLRCHSWKNTALHKVTYLQNGKGRKYFHHNSDFYIPKATLKDSGSYFCRGLVGSKNVSSETVNITITQGGGGGSGGGGSGGGGSDIQMTQSPSSLSASVGDRVTITCRASQDIRNYLNWYQQKPGKAPKLLIYYTSRLESGVPSRFSGSGSGTDYTLTISSLQPEDFATYYCQQGNTLPWTFGQGTKVEIKGGGGSGGGGSGGGGSEVQLVESGGGLVQPGGSLRLSCAASGYSFTGYTMNWVRQAPGKGLEWVALINPTKGVSTYNQKFKDRFTISVDKSKNTAYLQMNSLRAEDTAVYYCARSGYYGDSDWYFDVWGQGTLVTVSSGMRTEDLPKAVVFLEPQWYRVLEKDSVTLKCQGAYSPEDNSTQWFHNESLISSQASSYFIDAATVDDSGEYRCQTNLSTLSDPVQLEVHIGWLLLQAPRWVFKEEDPIHLRCHSWKNTALHKVTYLQNGKGRKYFHHNSDFYIPKATLKDSGSYFCRGLVGSKNVSSETVNITITQG

SEQ ID NO: 270 - protein, 827 aa, synthetic construct
EVQLVESGGGLVQPGNSLRLSCAASGFTFSSFGMSWVRQAPGKGLEWVSSISGSGSDTLYADSVKGRFTISRDNAKTTLYLQMNSLRPEDTAVYYCTIGGSLSRSSQGTLVTVSSGGGGSGGGGSGGGGSGMRTEDLPKAVVFLEPQWYRVLEKDSVTLKCQGAYSPEDNSTQWFHNESLISSQASSYFIDAATVDDSGEYRCQTNLSTLSDPVQLEVHIGWLLLQAPRWVFKEEDPIHLRCHSWKNTALHKVTYLQNGKGRKYFHHNSDFYIPKATLKDSGSYFCRGLVGSKNVSSETVNITITQGGGGGSGGGGSGGGGSDIQMTQSPSSLSASVGDRVTITCRASQDIRNYLNWYQQKPGKAPKLLIYYTSRLESGVPSRFSGSGSGTDYTLTISSLQPEDFATYYCQQGNTLPWTFGQGTKVEIKGGGGSGGGGSGGGGSEVQLVESGGGLVQPGGSLRLSCAASGYSFTGYTMNWVRQAPGKGLEWVALINPTKGVSTYNQKFKDRFTISVDKSKNTAYLQMNSLRAEDTAVYYCARSGYYGDSDWYFDVWGQGTLVTVSSGGGGSGGGGSGGGGSQVKLQQSGPGLVTPSQSLSITCTVSGFSLSDYGVHWVRQSPGQGLEWLGVIWAGGGTNYNSALMSRKSISKDNSKSQVFLKMNSLQADDTAVYYCARDKGYSYYYSMDYWGQGTTVTVSSGGGGSGGGGSGGGGSDIELTQSPASLAVSLGQRATISCRASESVEYYVTSLMQWYQQKPGQPPKLLIFAASNVESGVPARFSGSGSGTNFSLNIHPVDEDDVAMYFCQQSRKVPYTFGGGTKLEIK

SEQ ID NO: 271 - protein, 192 aa, synthetic construct
GMRTEDLPKAVVFLEPQWYRVLEKDSVTLKCQGAYSPEDNSTQWFHNESLISSQASSYFIDAATVDDSGEYRCQTNLSTLSDPVQLEVHIGWLLLQAPRWVFKEEDPIHLRCHSWKNTALHKVTYLQNGKGRKYFHHNSDFYIPKATLKDSGSYFCRGLFGSKNVSSETVNITITQGLAVPTISSFFPPGYQ

SEQ ID NO: 272 - protein, 192 aa, synthetic construct
GMRTEDLPKAVVFLEPQWYRVLEKDSVTLKCQGAYSPEDNSTQWFHNENLISSQASSYFIDAATVDDSGEYRCQTNLSTLSDPVQLEVHVGWLLLQAPRWVFKEEDPIHLRCHSWKNTALHKVTYLQNGKDRKYFHHNSDFHIPKATLKDSGSYFCRGLVGSKNVSSETVNITITQGLAVPTISSFSPPGYQ

SEQ ID NO: 273 - protein, 192 aa, synthetic construct
GMRTEDLPKAVVFLEPQWYSVLEKDSVTLKCQGAYSPEDNSTQWFHNESLISSQASSYFIDAATVNDSGEYRCQTNLSTLSDPVQLEVHIGWLLLQAPRWVFKEEDPIHLRCHSWKNTALHKVTYLQNGKDRKYFHHNSDFHIPKATLKDSGSYFCRGLVGSKNVSSETVNITITQGLAVPTISSFSPPGYQ

SEQ ID NO: 274 - protein, 192 aa, synthetic construct
GMRTEDLPKAVVFLEPQWYSVLEKDSVTLKCQGAYSPEDNSTQWFHNESLISSQASSYFIDDATVNDSGEYRCQTNLSTLSDPVQLEVHIGWLLLQAPRWVFKEEDPIHLRCHSWKNTALHKVTYLQNGKDRKYFHHNSDFHIPKATLKDSGSYFCRGLVGSKNVSSETVNITITQGLAVPTISSFSPPGYQ

SEQ ID NO: 275 - protein, 177 aa, synthetic construct
GMRTEDLPKAVVFLEPQWYRVLEKDSVTLKCQGAYSPEDNSTQWFHNENLISSQASSYFIDAATVDDSGEYRCQTNLSTLSDPVQLEVHVGWLLLQAPRWVFKEEDPIHLRCHSWKNTALHKVTYLQNGKDRKYFHHNSDFHIPKATLKDSGSYFCRGLVGSKNVSSETVNITITQG

SEQ ID NO: 276 - protein, 177 aa, synthetic construct
GMRTEDLPKAVVFLEPQWYSVLEKDSVTLKCQGAYSPEDNSTQWFHNESLISSQASSYFIDAATVNDSGEYRCQTNLSTLSDPVQLEVHIGWLLLQAPRWVFKEEDPIHLRCHSWKNTALHKVTYLQNGKDRKYFHHNSDFHIPKATLKDSGSYFCRGLVGSKNVSSETVNITITQG

SEQ ID NO: 277 - protein, 177 aa, synthetic construct
GMRTEDLPKAVVFLEPQWYSVLEKDSVTLKCQGAYSPEDNSTQWFHNESLISSQASSYFIDDATVNDSGEYRCQTNLSTLSDPVQLEVHIGWLLLQAPRWVFKEEDPIHLRCHSWKNTALHKVTYLQNGKDRKYFHHNSDFHIPKATLKDSGSYFCRGLVGSKNVSSETVNITITQG

SEQ ID NO: 278 - protein, 396 aa, synthetic construct
QVQLQESGGGLVQAGGSLRLSCAVSGNTLSRYAMGWFRQTPGNEREFVAAIRWNNGATYYADSVEGRFTISRDSGKNTVYLQMNNLKPEDTAVYYCAGRFLGYASSNAYHEALYNYDYWGQGTQVTVSSGGGGSGGGGSGGGGSDIQMTQSPSSLSASVGDRVTITCRASQDIRNYLNWYQQKPGKAPKLLIYYTSRLESGVPSRFSGSGSGTDYTLTISSLQPEDFATYYCQQGNTLPWTFGQGTKVEIKGGGGSGGGGSGGGGSEVQLVESGGGLVQPGGSLRLSCAASGYSFTGYTMNWVRQAPGKGLEWVALINPTKGVSTYNQKFKDRFTISVDKSKNTAYLQMNSLRAEDTAVYYCARSGYYGDSDWYFDVWGQGTLVTVSSGGHHHHHH

SEQ ID NO: 279 - protein, 238 aa, synthetic construct
EVQLVESGGGLVQPGGSLRLSCAASGYSFTGYTMNWVRQAPGKGLEWVALINPTKGVSTYNQKFKDRFTISVDKSKNTAYLQMNSLRAEDTAVYYCARSGYYGDSDWYFDVWGQGTLVTVSSASTKGPSVFPLAPSSKSTSGGTAALGCLVKDYFPEPVTVSWNSGALTSGVHTFPAVLQSSGLYSLSSVVTVPSSSLGTQTYICNVNHKPSNTKVDKKVEPKSSDKTHTGGHHHHHH

SEQ ID NO: 280 - protein, 421 aa, synthetic construct
DIQMTQSPSSLSASVGDRVTITCRASQDIRNYLNWYQQKPGKAPKLLIYYTSRLESGVPSRFSGSGSGTDYTLTISSLQPEDFATYYCQQGNTLPWTFGQGTKVEIKRTVAAPSVFIFPPSDEQLKSGTASVVCLLNNFYPREAKVQWKVDNALQSGNSQESVTEQDSKDSTYSLSSTLTLSKADYEKHKVYACEVTHQGLSSPVTKSFNRGESGGGGSGGGGSGGGGSGMRTEDLPKAVVFLEPQWYRVLEKDSVTLKCQGAYSPEDNSTQWFHNESLISSQASSYFIDAATVDDSGEYRCQTNLSTLSDPVQLEVHIGWLLLQAPRWVFKEEDPIHLRCHSWKNTALHKVTYLQNGKGRKYFHHNSDFYIPKATLKDSGSYFCRGLVGSKNVSSETVNITITQGLAVPTISSFFPPGYQ

SEQ ID NO: 281 - protein, 445 aa, synthetic construct
EVQLVESGGGLVQPGGSLRLSCAASGYSFTGYTMNWVRQAPGKGLEWVALINPTKGVSTYNQKFKDRFTISVDKSKNTAYLQMNSLRAEDTAVYYCARSGYYGDSDWYFDVWGQGTLVTVSSASTKGPSVFPLAPSSKSTSGGTAALGCLVKDYFPEPVTVSWNSGALTSGVHTFPAVLQSSGLYSLSSVVTVPSSSLGTQTYICNVNHKPSNTKVDKKVEPKSSDKTHTGGGGSGGGGSGGGGSGMRTEDLPKAVVFLEPQWYRVLEKDSVTLKCQGAYSPEDNSTQWFHNESLISSQASSYFIDAATVDDSGEYRCQTNLSTLSDPVQLEVHIGWLLLQAPRWVFKEEDPIHLRCHSWKNTALHKVTYLQNGKGRKYFHHNSDFYIPKATLKDSGSYFCRGLVGSKNVSSETVNITITQGLAVPTISSFFPPGYQGGHHHHHH

SEQ ID NO: 282 - protein, 236 aa, synthetic construct
EVQLQQSGAELVKPGASVKLSCTGSGFNIKDTYIYWLKQRPEQGLEWIGRIDPANGDTEYDPKFQGKATIRADTSSNTAYLQLSSLTSDDTVVYYCARKYGNNRAWFAFWGQGTLVTVSAASTKGPSVFPLAPSSKSTSGGTAALGCLVKDYFPEPVTVSWNSGALTSGVHTFPAVLQSSGLYSLSSVVTVPSSSLGTQTYICNVNHKPSNTKVDKKVEPKSSDKTHTGGHHHHHH

SEQ ID NO: 283 - protein, 107 aa, synthetic construct
QIVMTQTPKSLLVSAGDRVTITCKASQSVSDDVAWYQQKPGQSPKLLIYFASYRYTGVPDRFTGSGYGTDFTLTISSVQADDAAVYYCQQDYSSPLTFGAGTKVELK

SEQ ID NO: 284 - protein, 108 aa, synthetic construct
ASTKGPSVFPLASSSKSTSGGTAALGCLVKDYFPEPVTVSWNSGALTSGVHTCPAVLQSSGLYSLSSVVTVPSSSLGTQTYICNVNHEPSNTKVDKKVEPKSSDKTHT

SEQ ID NO: 285 - protein, 236 aa, synthetic construct
EVQLQQSGAELVKPGASVKLSCTGSGFNIKDTYIYWLKQRPEQGLEWIGRIDPANGDTEYDPKFQGKATIRADTSSNTAYLQLSSLTSDDTVVYYCARKYGNNRAWFAFWGQGTLVTVSAASTKGPSVFPLASSSKSTSGGTAALGCLVKDYFPEPVTVSWNSGALTSGVHTCPAVLQSSGLYSLSSVVTVPSSSLGTQTYICNVNHEPSNTKVDKKVEPKSSDKTHTGGHHHHHH

SEQ ID NO: 286 - protein, 214 aa, synthetic construct
QIVMTQTPKSLLVSAGDRVTITCKASQSVSDDVAWYQQKPGQSPKLLIYFASYRYTGVPDRFTGSGYGTDFTLTISSVQADDAAVYYCQQDYSSPLTFGAGTKVELKRTVAAPSVFIFPPSDEQLKSGTASVVCLLNNFYPREAKVQWKVDNALQSGNSQESVTEQDSKDSTYSLCSTLTLSKADYEKHKVYACEVTHQGLSSPVTKSFNRGES

SEQ ID NO: 287 - protein, 473 aa, synthetic construct
QIVMTQTPKSLLVSAGDRVTITCKASQSVSDDVAWYQQKPGQSPKLLIYFASYRYTGVPDRFTGSGYGTDFTLTISSVQADDAAVYYCQQDYSSPLTFGAGTKVELKRTVAAPSVFIFPPSDEQLKSGTASVVCLLNNFYPREAKVQWKVDNALQSGNSQESVTEQDSKDSTYSLCSTLTLSKADYEKHKVYACEVTHQGLSSPVTKSFNRGESGGGGSGGGGSGGGGSDIQMTQSPSSLSASVGDRVTITCRASQDIRNYLNWYQQKPGKAPKLLIYYTSRLESGVPSRFSGSGSGTDYTLTISSLQPEDFATYYCQQGNTLPWTFGQGTKVEIKGGGGSGGGGSGGGGSEVQLVESGGGLVQPGGSLRLSCAASGYSFTGYTMNWVRQAPGKGLEWVALINPTKGVSTYNQKFKDRFTISVDKSKNTAYLQMNSLRAEDTAVYYCARSGYYGDSDWYFDVWGQGTLVTVSS

SEQ ID NO: 288 - protein, 117 aa, synthetic construct
QVQLQQPGAELVKPGASVKMSCKASGYTFTNYWINWVKQRPGQGLEWIGDIYPGGGITNYNEKFKTKATLTLDTSSSTVYMQLSSLTSEDSAVYYCSRSYGKYFDYWGQGTTLIVSS

SEQ ID NO: 289 - protein, 233 aa, synthetic construct
QVQLQQPGAELVKPGASVKMSCKASGYTFTNYWINWVKQRPGQGLEWIGDIYPGGGITNYNEKFKTKATLTLDTSSSTVYMQLSSLTSEDSAVYYCSRSYGKYFDYWGQGTTLIVSSASTKGPSVFPLAPSSKSTSGGTAALGCLVKDYFPEPVTVSWNSGALTSGVHTCPAVLQSSGLYSLSSVVTVPSSSLGTQTYICNVNHKPSNTKVDKKVEPKSSDKTHTGGHHHHHH

SEQ ID NO: 290 - protein, 107 aa, synthetic construct
DIKMTQSPSSMYASVGERVTITCKASQDIKSYLTWYQKKPWKSPRTLIFYSTRLADGVPSRFSGSGSGQDFSLTISSLESDDTATYYCLQHDESPFTFGGGTKLEIK

SEQ ID NO: 291 - protein, 214 aa, synthetic construct
DIKMTQSPSSMYASVGERVTITCKASQDIKSYLTWYQKKPWKSPRTLIFYSTRLADGVPSRFSGSGSGQDFSLTISSLESDDTATYYCLQHDESPFTFGGGTKLEIKRTVAAPSVFIFPPSDEQLKSGTASVVCLLNNFYPREAKVQWKVDNALQSGNSQESVTEQDSKDSTYSLCSTLTLSKADYEKHKVYACEVTHQGLSSPVTKSFNRGES

SEQ ID NO: 292 - protein, 473 aa, synthetic construct
DIKMTQSPSSMYASVGERVTITCKASQDIKSYLTWYQKKPWKSPRTLIFYSTRLADGVPSRFSGSGSGQDFSLTISSLESDDTATYYCLQHDESPFTFGGGTKLEIKRTVAAPSVFIFPPSDEQLKSGTASVVCLLNNFYPREAKVQWKVDNALQSGNSQESVTEQDSKDSTYSLCSTLTLSKADYEKHKVYACEVTHQGLSSPVTKSFNRGESGGGGSGGGGSGGGGSDIQMTQSPSSLSASVGDRVTITCRASQDIRNYLNWYQQKPGKAPKLLIYYTSRLESGVPSRFSGSGSGTDYTLTISSLQPEDFATYYCQQGNTLPWTFGQGTKVEIKGGGGSGGGGSGGGGSEVQLVESGGGLVQPGGSLRLSCAASGYSFTGYTMNWVRQAPGKGLEWVALINPTKGVSTYNQKFKDRFTISVDKSKNTAYLQMNSLRAEDTAVYYCARSGYYGDSDWYFDVWGQGTLVTVSS

SEQ ID NO: 293 - protein, 309 aa, synthetic construct
EFCLSSEFQCQSSGRCIPLAWVCDGDNDCRDDSDEKSCKPRTGGGGSGGGGSGGGGSDIQMTQSPSSLSASVGDRVTITCRASQDIRNYLNWYQQKPGKAPKLLIYYTSRLESGVPSRFSGSGSGTDYTLTISSLQPEDFATYYCQQGNTLPWTFGQGTKVEIKGGGGSGGGGSGGGGSEVQLVESGGGLVQPGGSLRLSCAASGYSFTGYTMNWVRQAPGKGLEWVALINPTKGVSTYNQKFKDRFTISVDKSKNTAYLQMNSLRAEDTAVYYCARSGYYGDSDWYFDVWGQGTLVTVSSGGHHHHHH

SEQ ID NO: 294 - protein, 182 aa, synthetic construct
APPKAVLKLEPPWINVLQEDSVTLTCQGARSPESDSIQWFHNGNLIPTHTQPSYHFKANNNDSGEYTCQTGQTSLSDPVHLTVLSEWLVLQTPHLEFQEGETIMLRCHSWKDKPLVNVVFFQNGKSQKFSHLDPTFSIPQANHSHSGDYHCTGNIGYTQFSSKPVTITVQEPSMGSSSPMGI

SEQ ID NO: 295 - protein, 449 aa, synthetic construct
APPKAVLKLEPPWINVLQEDSVTLTCQGARSPESDSIQWFHNGNLIPTHTQPSYHFKANNNDSGEYTCQTGQTSLSDPVHLTVLSEWLVLQTPHLEFQEGETIMLRCHSWKDKPLVNVVFFQNGKSQKFSHLDPTFSIPQANHSHSGDYHCTGNIGYTQFSSKPVTITVQEPSMGSSSPMGIGGGGSGGGGSGGGGSDIQMTQSPSSLSASVGDRVTITCRASQDIRNYLNWYQQKPGKAPKLLIYYTSRLESGVPSRFSGSGSGTDYTLTISSLQPEDFATYYCQQGNTLPWTFGQGTKVEIKGGGGSGGGGSGGGGSEVQLVESGGGLVQPGGSLRLSCAASGYSFTGYTMNWVRQAPGKGLEWVALINPTKGVSTYNQKFKDRFTISVDKSKNTAYLQMNSLRAEDTAVYYCARSGYYGDSDWYFDVWGQGTLVTVSSGGHHHHHH

SEQ ID NO: 296 - protein, 192 aa, synthetic construct
GMRTEDLPKAVVFLEPQWYRVLEKDSVTLKCQGAYSPEDNSTQWFHNESLISSQASSYFIDAATVDDSGEYRCQTNLSTLSDPVQLEVHIGWLLLQAPRWVFKEEDPIHLRCHSWKNTALHNVVYLQNGKGRKYFHHNSDFYIPKATLKDSGSYFCRGLVGSKNVSSETVNITITEGLAVPTISSFFPPGYQ

SEQ ID NO: 297 - protein, 460 aa, synthetic construct
GMRTEDLPKAVVFLEPQWYRVLEKDSVTLKCQGAYSPEDNSTQWFHNESLISSQASSYFIDAATVDDSGEYRCQTNLSTLSDPVQLEVHIGWLLLQAPRWVFKEEDPIHLRCHSWKNTALHNVVYLQNGKGRKYFHHNSDFYIPKATLKDSGSYFCRGLVGSKNVSSETVNITITEGLAVPTISSFFPPGYQGGGGGSGGGGSGGGGSDIQMTQSPSSLSASVGDRVTITCRASQDIRNYLNWYQQKPGKAPKLLIYYTSRLESGVPSRFSGSGSGTDYTLTISSLQPEDFATYYCQQGNTLPWTFGQGTKVEIKGGGGSGGGGSGGGGSEVQLVESGGGLVQPGGSLRLSCAASGYSFTGYTMNWVRQAPGKGLEWVALINPTKGVSTYNQKFKDRFTISVDKSKNTAYLQMNSLRAEDTAVYYCARSGYYGDSDWYFDVWGQGTLVTVSSGGHHHHHH

SEQ ID NO: 298 - protein, 192 aa, synthetic construct
GMRTEDLPKAVVFLEPQWYRVLEKDSVTLKCQGAYSPEDNSTQWFHNESLISSQASSYFIDAATVDDSGEYRCQTNLSTLSDPVQLEVHRGWLLLQAPRWVFKEEDPIHLRCHSWKNKLLHKVTYLQNGKGRKFFHHNSDFYIPKATLKDSGSYFCRGLVGSKNVSSETVNITITQGLAVPTISSFFPPGYQ

SEQ ID NO: 299 - protein, 460 aa, synthetic construct
GMRTEDLPKAVVFLEPQWYRVLEKDSVTLKCQGAYSPEDNSTQWFHNESLISSQASSYFIDAATVDDSGEYRCQTNLSTLSDPVQLEVHRGWLLLQAPRWVFKEEDPIHLRCHSWKNKLLHKVTYLQNGKGRKFFHHNSDFYIPKATLKDSGSYFCRGLVGSKNVSSETVNITITQGLAVPTISSFFPPGYQGGGGGSGGGGSGGGGSDIQMTQSPSSLSASVGDRVTITCRASQDIRNYLNWYQQKPGKAPKLLIYYTSRLESGVPSRFSGSGSGTDYTLTISSLQPEDFATYYCQQGNTLPWTFGQGTKVEIKGGGGSGGGGSGGGGSEVQLVESGGGLVQPGGSLRLSCAASGYSFTGYTMNWVRQAPGKGLEWVALINPTKGVSTYNQKFKDRFTISVDKSKNTAYLQMNSLRAEDTAVYYCARSGYYGDSDWYFDVWGQGTLVTVSSGGHHHHHH

SEQ ID NO: 300 - protein, 184 aa, synthetic construct
KAVITLQPPWVSVFQEETVTLHCEVLHLPGSSSTQWFLNGTATQTSTPSYRITSASVNDSGEYRCQRGLSGRSDPIQLEIHRGWLLLQAPRWVFKEEDPIHLRCHSWKNTALHKVTYLQNGKGRKYFHHNSDFYIPKATLKDSGSYFCRGLVGSKNVSSETVNITITQGLAVPTISSFFPPGYQ

SEQ ID NO: 301 - protein, 451 aa, synthetic construct
KAVITLQPPWVSVFQEETVTLHCEVLHLPGSSSTQWFLNGTATQTSTPSYRITSASVNDSGEYRCQRGLSGRSDPIQLEIHRGWLLLQAPRWVFKEEDPIHLRCHSWKNTALHKVTYLQNGKGRKYFHHNSDFYIPKATLKDSGSYFCRGLVGSKNVSSETVNITITQGLAVPTISSFFPPGYQGGGGSGGGGSGGGGSDIQMTQSPSSLSASVGDRVTITCRASQDIRNYLNWYQQKPGKAPKLLIYYTSRLESGVPSRFSGSGSGTDYTLTISSLQPEDFATYYCQQGNTLPWTFGQGTKVEIKGGGGSGGGGSGGGGSEVQLVESGGGLVQPGGSLRLSCAASGYSFTGYTMNWVRQAPGKGLEWVALINPTKGVSTYNQKFKDRFTISVDKSKNTAYLQMNSLRAEDTAVYYCARSGYYGDSDWYFDVWGQGTLVTVSSGGHHHHHH

SEQ ID NO: 302 - protein, 445 aa, synthetic construct
GMRTEDLPKAVVFLEPQWYRVLEKDSVTLKCQGAYSPEDNSTQWFHNESLISSQASSYFIDAATVDDSGEYRCQTNLSTLSDPVQLEVHIGWLLLQAPRWVFKEEDPIHLRCHSWKNTALHKVTYLQNGKGRKYFHHNSDFYIPKATLKDSGSYFCRGLVGSKNVSSETVNITITQGLAVPTISSFFPPGYQGGGGSGGGGSGGGGSEVQLVESGGGLVQPGGSLRLSCAASGYSFTGYTMNWVRQAPGKGLEWVALINPTKGVSTYNQKFKDRFTISVDKSKNTAYLQMNSLRAEDTAVYYCARSGYYGDSDWYFDVWGQGTLVTVSSASTKGPSVFPLAPSSKSTSGGTAALGCLVKDYFPEPVTVSWNSGALTSGVHTCPAVLQSSGLYSLSSVVTVPSSSLGTQTYICNVNHKPSNTKVDKKVEPKSSDKTHTGGHHHHHH

SEQ ID NO: 303 - protein, 421 aa, synthetic construct
GMRTEDLPKAVVFLEPQWYRVLEKDSVTLKCQGAYSPEDNSTQWFHNESLISSQASSYFIDAATVDDSGEYRCQTNLSTLSDPVQLEVHIGWLLLQAPRWVFKEEDPIHLRCHSWKNTALHKVTYLQNGKGRKYFHHNSDFYIPKATLKDSGSYFCRGLVGSKNVSSETVNITITQGLAVPTISSFFPPGYQGGGGSGGGGSGGGGSDIQMTQSPSSLSASVGDRVTITCRASQDIRNYLNWYQQKPGKAPKLLIYYTSRLESGVPSRFSGSGSGTDYTLTISSLQPEDFATYYCQQGNTLPWTFGQGTKVEIKRTVAAPSVFIFPPSDEQLKSGTASVVCLLNNFYPREAKVQWKVDNALQSGNSQESVTEQDSKDSTYSLCSTLTLSKADYEKHKVYACEVTHQGLSSPVTKSFNRGES

SEQ ID NO: 304 - protein, 442 aa, synthetic construct
QVQLQQSGAELARPGASVKMSCKTSGYTFTRYTMHWVKQRPGQGLEWIGYINPSRGYTNYNQKFKDKATLTTDKSSSTAYMQLSSLTSEDSAVYYCARYYDDHYSLDYWGQGTTLTVSSASTKGPSVFPLAPSSKSTSGGTAALGCLVKDYFPEPVTVSWNSGALTSGVHTCPAVLQSSGLYSLSSVVTVPSSSLGTQTYICNVNHKPSNTKVDKKVEPKSSDKTHTGGGGSGGGGSGGGGSGMRTEDLPKAVVFLEPQWYRVLEKDSVTLKCQGAYSPEDNSTQWFHNESLISSQASSYFIDAATVDDSGEYRCQTNLSTLSDPVQLEVHIGWLLLQAPRWVFKEEDPIHLRCHSWKNTALHKVTYLQNGKGRKYFHHNSDFYIPKATLKDSGSYFCRGLVGSKNVSSETVNITITQGLAVPTISSFFPPGYQGGHHHHHH

SEQ ID NO: 305 - protein, 420 aa, synthetic construct
QIVLTQSPSSLSASLGEKVTMTCRASSSVSYMNWYQQKPGTSPKRWIYDTSKVASGVPDRFSGSGSGTSYSLTISSMEAEDAATYYCQQWSSNPLTFGAGTKLELKRTVAAPSVFIFPPSDEQLKSGTASVVCLLNNFYPREAKVQWKVDNALQSGNSQESVTEQDSKDSTYSLCSTLTLSKADYEKHKVYACEVTHQGLSSPVTKSFNRGESGGGGSGGGGSGGGGSGMRTEDLPKAVVFLEPQWYRVLEKDSVTLKCQGAYSPEDNSTQWFHNESLISSQASSYFIDAATVDDSGEYRCQTNLSTLSDPVQLEVHIGWLLLQAPRWVFKEEDPIHLRCHSWKNTALHKVTYLQNGKGRKYFHHNSDFYIPKATLKDSGSYFCRGLVGSKNVSSETVNITITQGLAVPTISSFFPPGYQ

SEQ ID NO: 306 - protein, 442 aa, synthetic construct
GMRTEDLPKAVVFLEPQWYRVLEKDSVTLKCQGAYSPEDNSTQWFHNESLISSQASSYFIDAATVDDSGEYRCQTNLSTLSDPVQLEVHIGWLLLQAPRWVFKEEDPIHLRCHSWKNTALHKVTYLQNGKGRKYFHHNSDFYIPKATLKDSGSYFCRGLVGSKNVSSETVNITITQGLAVPTISSFFPPGYQGGGGSGGGGSGGGGSQVQLQQSGAELARPGASVKMSCKTSGYTFTRYTMHWVKQRPGQGLEWIGYINPSRGYTNYNQKFKDKATLTTDKSSSTAYMQLSSLTSEDSAVYYCARYYDDHYSLDYWGQGTTLTVSSASTKGPSVFPLAPSSKSTSGGTAALGCLVKDYFPEPVTVSWNSGALTSGVHTCPAVLQSSGLYSLSSVVTVPSSSLGTQTYICNVNHKPSNTKVDKKVEPKSSDKTHTGGHHHHHH

SEQ ID NO: 307 - protein, 420 aa, synthetic construct
GMRTEDLPKAVVFLEPQWYRVLEKDSVTLKCQGAYSPEDNSTQWFHNESLISSQASSYFIDAATVDDSGEYRCQTNLSTLSDPVQLEVHIGWLLLQAPRWVFKEEDPIHLRCHSWKNTALHKVTYLQNGKGRKYFHHNSDFYIPKATLKDSGSYFCRGLVGSKNVSSETVNITITQGLAVPTISSFFPPGYQGGGGSGGGGSGGGGSQIVLTQSPSSLSASLGEKVTMTCRASSSVSYMNWYQQKPGTSPKRWIYDTSKVASGVPDRFSGSGSGTSYSLTISSMEAEDAATYYCQQWSSNPLTFGAGTKLELKRTVAAPSVFIFPPSDEQLKSGTASVVCLLNNFYPREAKVQWKVDNALQSGNSQESVTEQDSKDSTYSLCSTLTLSKADYEKHKVYACEVTHQGLSSPVTKSFNRGES

SEQ ID NO: 308 - protein, 649 aa, synthetic construct
GMRTEDLPKAVVFLEPQWYRVLEKDSVTLKCQGAYSPEDNSTQWFHNESLISSQASSYFIDAATVDDSGEYRCQTNLSTLSDPVQLEVHIGWLLLQAPRWVFKEEDPIHLRCHSWKNTALHKVTYLQNGKGRKYFHHNSDFYIPKATLKDSGSYFCRGLVGSKNVSSETVNITITQGLAVPTISSFFPPGYQGGGGSGGGGSGGGGSQVQLQQSGAELARPGASVKMSCKTSGYTFTRYTMHWVKQRPGQGLEWIGYINPSRGYTNYNQKFKDKATLTTDKSSSTAYMQLSSLTSEDSAVYYCARYYDDHYSLDYWGQGTTLTVSSASTKGPSVFPLAPSSKSTSGGTAALGCLVKDYFPEPVTVSWNSGALTSGVHTCPAVLQSSGLYSLSSVVTVPSSSLGTQTYICNVNHKPSNTKVDKKVEPKSSDKTHTGGGGSGGGGSGGGGSGMRTEDLPKAVVFLEPQWYRVLEKDSVTLKCQGAYSPEDNSTQWFHNESLISSQASSYFIDAATVDDSGEYRCQTNLSTLSDPVQLEVHIGWLLLQAPRWVFKEEDPIHLRCHSWKNTALHKVTYLQNGKGRKYFHHNSDFYIPKATLKDSGSYFCRGLVGSKNVSSETVNITITQGLAVPTISSFFPPGYQGGHHHHHH

SEQ ID NO: 309 - protein, 330 aa, synthetic construct
ASTKGPSVFPLAPSSKSTSGGTAALGCLVKDYFPEPVTVSWNSGALTSGVHTCPAVLQSSGLYSLSSVVTVPSSSLGTQTYICNVNHKPSNTKVDKKVEPKSSDKTHTCPPCPAPEAAGGPSVFLFPPKPKDTLMISRTPEVTCVVVDVSHEDPEVKFNWYVDGVEVHNAKTKPREEQYNSTYRVVSVLTVLHQDWLNGKEYKCKVSNKALAAPIEKTISKAKGQPREPQVYTLPPSRDELTKNQVSLSCAVKGFYPSDIAVEWESNGQPENNYKTTPPVLDSDGSFFLVSKLTVDKSRWQQGNVFSCSVMHEALHNHYTQKSLSLSPGK

SEQ ID NO: 310 - protein, 537 aa, synthetic construct
GMRTEDLPKAVVFLEPQWYRVLEKDSVTLKCQGAYSPEDNSTQWFHNESLISSQASSYFIDAATVDDSGEYRCQTNLSTLSDPVQLEVHIGWLLLQAPRWVFKEEDPIHLRCHSWKNTALHKVTYLQNGKGRKYFHHNSDFYIPKATLKDSGSYFCRGLVGSKNVSSETVNITITQGLAVPTISSFFPPGYQGGGGSGGGGSGGGGSASTKGPSVFPLAPSSKSTSGGTAALGCLVKDYFPEPVTVSWNSGALTSGVHTCPAVLQSSGLYSLSSVVTVPSSSLGTQTYICNVNHKPSNTKVDKKVEPKSSDKTHTCPPCPAPEAAGGPSVFLFPPKPKDTLMISRTPEVTCVVVDVSHEDPEVKFNWYVDGVEVHNAKTKPREEQYNSTYRVVSVLTVLHQDWLNGKEYKCKVSNKALAAPIEKTISKAKGQPREPQVYTLPPSRDELTKNQVSLSCAVKGFYPSDIAVEWESNGQPENNYKTTPPVLDSDGSFFLVSKLTVDKSRWQQGNVFSCSVMHEALHNHYTQKSLSLSPGK

SEQ ID NO: 311 - protein, 314 aa, synthetic construct
GMRTEDLPKAVVFLEPQWYRVLEKDSVTLKCQGAYSPEDNSTQWFHNESLISSQASSYFIDAATVDDSGEYRCQTNLSTLSDPVQLEVHIGWLLLQAPRWVFKEEDPIHLRCHSWKNTALHKVTYLQNGKGRKYFHHNSDFYIPKATLKDSGSYFCRGLVGSKNVSSETVNITITQGLAVPTISSFFPPGYQGGGGSGGGGSGGGGSRTVAAPSVFIFPPSDEQLKSGTASVVCLLNNFYPREAKVQWKVDNALQSGNSQESVTEQDSKDSTYSLCSTLTLSKADYEKHKVYACEVTHQGLSSPVTKSFNRGES

SEQ ID NO: 312 - protein, 13 aa, synthetic construct
ASTKGPSVFPLAP

SEQ ID NO: 313 - protein, 247 aa, synthetic construct
QVQLQQPGAELVKPGASVKMSCKASGYTFTNYWINWVKQRPGQGLEWIGDIYPGGGITNYNEKFKTKATLTLDTSSSTVYMQLSSLTSEDSAVYYCSRSYGKYFDYWGQGTTLIVSSASTKGPSVFPLAPQVQLQQPGAELVKPGASVKMSCKASGYTFTNYWINWVKQRPGQGLEWIGDIYPGGGITNYNEKFKTKATLTLDTSSSTVYMQLSSLTSEDSAVYYCSRSYGKYFDYWGQGTTLIVSS

SEQ ID NO: 314 - protein, 495 aa, synthetic construct
QVQLQQPGAELVKPGASVKMSCKASGYTFTNYWINWVKQRPGQGLEWIGDIYPGGGITNYNEKFKTKATLTLDTSSSTVYMQLSSLTSEDSAVYYCSRSYGKYFDYWGQGTTLIVSSASTKGPSVFPLAPQVQLQQPGAELVKPGASVKMSCKASGYTFTNYWINWVKQRPGQGLEWIGDIYPGGGITNYNEKFKTKATLTLDTSSSTVYMQLSSLTSEDSAVYYCSRSYGKYFDYWGQGTTLIVSSASTKGPSVFPLAPQVQLQQSGAELARPGASVKMSCKTSGYTFTRYTMHWVKQRPGQGLEWIGYINPSRGYTNYNQKFKDKATLTTDKSSSTAYMQLSSLTSEDSAVYYCARYYDDHYSLDYWGQGTTLTVSSASTKGPSVFPLAPSSKSTSGGTAALGCLVKDYFPEPVTVSWNSGALTSGVHTCPAVLQSSGLYSLSSVVTVPSSSLGTQTYICNVNHKPSNTKVDKKVEPKSSDKTHTGGHHHHHH

SEQ ID NO: 315 - protein, 13 aa, synthetic construct
RTVAAPSVFIFPP

SEQ ID NO: 316 - protein, 227 aa, synthetic construct
DIKMTQSPSSMYASVGERVTITCKASQDIKSYLTWYQKKPWKSPRTLIFYSTRLADGVPSRFSGSGSGQDFSLTISSLESDDTATYYCLQHDESPFTFGGGTKLEIKRTVAAPSVFIFPPDIKMTQSPSSMYASVGERVTITCKASQDIKSYLTWYQKKPWKSPRTLIFYSTRLADGVPSRFSGSGSGQDFSLTISSLESDDTATYYCLQHDESPFTFGGGTKLEIK

SEQ ID NO: 317 - protein, 453 aa, synthetic construct
DIKMTQSPSSMYASVGERVTITCKASQDIKSYLTWYQKKPWKSPRTLIFYSTRLADGVPSRFSGSGSGQDFSLTISSLESDDTATYYCLQHDESPFTFGGGTKLEIKRTVAAPSVFIFPPDIKMTQSPSSMYASVGERVTITCKASQDIKSYLTWYQKKPWKSPRTLIFYSTRLADGVPSRFSGSGSGQDFSLTISSLESDDTATYYCLQHDESPFTFGGGTKLEIKRTVAAPSVFIFPPQIVLTQSPSSLSASLGEKVTMTCRASSSVSYMNWYQQKPGTSPKRWIYDTSKVASGVPDRFSGSGSGTSYSLTISSMEAEDAATYYCQQWSSNPLTFGAGTKLELKRTVAAPSVFIFPPSDEQLKSGTASVVCLLNNFYPREAKVQWKVDNALQSGNSQESVTEQDSKDSTYSLCSTLTLSKADYEKHKVYACEVTHQGLSSPVTKSFNRGES

SEQ ID NO: 318 - protein, 355 aa, synthetic construct
QVQLQQPGAELVKPGASVKMSCKASGYTFTNYWINWVKQRPGQGLEWIGDIYPGGGITNYNEKFKTKATLTLDTSSSTVYMQLSSLTSEDSAVYYCSRSYGKYFDYWGQGTTLIVSSASTKGPSVFPLAPQVQLQQPGAELVKPGASVKMSCKASGYTFTNYWINWVKQRPGQGLEWIGDIYPGGGITNYNEKFKTKATLTLDTSSSTVYMQLSSLTSEDSAVYYCSRSYGKYFDYWGQGTTLIVSSASTKGPSVFPLAPSSKSTSGGTAALGCLVKDYFPEPVTVSWNSGALTSGVHTCPAVLQSSGLYSLSSVVTVPSSSLGTQTYICNVNHKPSNTKVDKKVEPKSSDKTHT

SEQ ID NO: 319 - protein, 597 aa, synthetic construct
DIKMTQSPSSMYASVGERVTITCKASQDIKSYLTWYQKKPWKSPRTLIFYSTRLADGVPSRFSGSGSGQDFSLTISSLESDDTATYYCLQHDESPFTFGGGTKLEIKRTVAAPSVFIFPPDIKMTQSPSSMYASVGERVTITCKASQDIKSYLTWYQKKPWKSPRTLIFYSTRLADGVPSRFSGSGSGQDFSLTISSLESDDTATYYCLQHDESPFTFGGGTKLEIKRTVAAPSVFIFPPSDEQLKSGTASVVCLLNNFYPREAKVQWKVDNALQSGNSQESVTEQDSKDSTYSLCSTLTLSKADYEKHKVYACEVTHQGLSSPVTKSFNRGESGGGGSGGGGSGGGGSQVQLQQSGAELARPGASVKMSCKTSGYTFTRYTMHWVKQRPGQGLEWIGYINPSRGYTNYNQKFKDKATLTTDKSSSTAYMQLSSLTSEDSAVYYCARYYDDHYSLDYWGQGTTLTVSSGGGGSGGGGSGGGGSQIVLTQSPSSLSASLGEKVTMTCRASSSVSYMNWYQQKPGTSPKRWIYDTSKVASGVPDRFSGSGSGTSYSLTISSMEAEDAATYYCQQWSSNPLTFGAGTKLELKGGHHHHHH

SEQ ID NO: 320 - protein, 489 aa, synthetic construct
QVQLQQSGAELARPGASVKMSCKTSGYTFTRYTMHWVKQRPGQGLEWIGYINPSRGYTNYNQKFKDKATLTTDKSSSTAYMQLSSLTSEDSAVYYCARYYDDHYSLDYWGQGTTLTVSSASTKGPSVFPLAPSSKSTSGGTAALGCLVKDYFPEPVTVSWNSGALTSGVHTCPAVLQSSGLYSLSSVVTVPSSSLGTQTYICNVNHKPSNTKVDKKVEPKSSDKTHTGGGGSGGGGSGGGGSDIKMTQSPSSMYASVGERVTITCKASQDIKSYLTWYQKKPWKSPRTLIFYSTRLADGVPSRFSGSGSGQDFSLTISSLESDDTATYYCLQHDESPFTFGGGTKLEIKGGGGSGGGGSGGGGSQVQLQQPGAELVKPGASVKMSCKASGYTFTNYWINWVKQRPGQGLEWIGDIYPGGGITNYNEKFKTKATLTLDTSSSTVYMQLSSLTSEDSAVYYCSRSYGKYFDYWGQGTTLIVSSGGHHHHHH

SEQ ID NO: 321 - protein, 467 aa, synthetic construct
QIVLTQSPSSLSASLGEKVTMTCRASSSVSYMNWYQQKPGTSPKRWIYDTSKVASGVPDRFSGSGSGTSYSLTISSMEAEDAATYYCQQWSSNPLTFGAGTKLELKRTVAAPSVFIFPPSDEQLKSGTASVVCLLNNFYPREAKVQWKVDNALQSGNSQESVTEQDSKDSTYSLCSTLTLSKADYEKHKVYACEVTHQGLSSPVTKSFNRGESGGGGSGGGGSGGGGSDIKMTQSPSSMYASVGERVTITCKASQDIKSYLTWYQKKPWKSPRTLIFYSTRLADGVPSRFSGSGSGQDFSLTISSLESDDTATYYCLQHDESPFTFGGGTKLEIKGGGGSGGGGSGGGGSQVQLQQPGAELVKPGASVKMSCKASGYTFTNYWINWVKQRPGQGLEWIGDIYPGGGITNYNEKFKTKATLTLDTSSSTVYMQLSSLTSEDSAVYYCSRSYGKYFDYWGQGTTLIVSS

SEQ ID NO: 322 - protein, 125 aa, synthetic construct
QVQLQESGGGLVQAGGSLRLSCAASGRAVGNYIIGWFRQAPGKEREFVATTTRDGGSTFYADSVKGRFTISRDNAKNTVNLQMNSLEPEDTAVYYCAAKSWSVPLRPTSADFDSWGQGTQVTVSS

SEQ ID NO: 323 - protein, 115 aa, synthetic construct
QVQLQESGGGLVQPGESLRLSCAASGIAFEVFNMGWYRQAPGKQRELVATITNSGATNYADSVKGRFTISRDNAKDTLYLQMNSLKPEDTAVYYCNAQNSWRNIWGQGTQVTVSS

SEQ ID NO: 324 - protein, 185 aa, synthetic construct
ALPKAVVKLDPPWIQVLKEDMVTLMCEGTHNPGNSSTQWFHNGRSIRSQVQASYTFKATVNDSGEYRCQMEQTRLSDPVDLGVISDWLLLQTPQRVFLEGETITLRCHSWRNKLLNRISFFHNEKSVRYHHYKSNFSIPKANHSHSGDYYCKGSLGSTQHQSKPVTITVQDPATTSSISLVWYHT

SEQ ID NO: 325 - protein, 178 aa, synthetic construct
THDLPKAVVKLEPPWIQVLKEDTVTLTCEGTHNPGNSSTQWFHNGRSIRSQVQASYTFKATVNDSGEYRCQMEQTRLSDPVDLGVISDWLLLQTPQLVFLEGETITLRCHSWRNKLLNRISFFHNEKSVRYHHYSSNFSIPKANHSHSGDYYCKGSLGRTLHQSKPVTITVQGPKSSR

SEQ ID NO: 326 - protein, 375 aa, synthetic construct
QVQLQQSGAELARPGASVKMSCKTSGYTFTRYTMHWVKQRPGQGLEWIGYINPSRGYTNYNQKFKDKATLTTDKSSSTAYMQLSSLTSEDSAVYYCARYYDDHYSLDYWGQGTTLTVSSASTKGPSVFPLAPSSKSTSGGTAALGCLVKDYFPEPVTVSWNSGALTSGVHTCPAVLQSSGLYSLSSVVTVPSSSLGTQTYICNVNHKPSNTKVDKKVEPKSSDKTHTGGGGSGGGGSGGGGSQVQLQESGGGLVQAGGSLRLSCAASGRAVGNYIIGWFRQAPGKEREFVATTTRDGGSTFYADSVKGRFTISRDNAKNTVNLQMNSLEPEDTAVYYCAAKSWSVPLRPTSADFDSWGQGTQVTVSSGGHHHHHH

SEQ ID NO: 327 - protein, 353 aa, synthetic construct
QIVLTQSPSSLSASLGEKVTMTCRASSSVSYMNWYQQKPGTSPKRWIYDTSKVASGVPDRFSGSGSGTSYSLTISSMEAEDAATYYCQQWSSNPLTFGAGTKLELKRTVAAPSVFIFPPSDEQLKSGTASVVCLLNNFYPREAKVQWKVDNALQSGNSQESVTEQDSKDSTYSLCSTLTLSKADYEKHKVYACEVTHQGLSSPVTKSFNRGESGGGGSGGGGSGGGGSQVQLQESGGGLVQAGGSLRLSCAASGRAVGNYIIGWFRQAPGKEREFVATTTRDGGSTFYADSVKGRFTISRDNAKNTVNLQMNSLEPEDTAVYYCAAKSWSVPLRPTSADFDSWGQGTQVTVSS

SEQ ID NO: 328 - protein, 365 aa, synthetic construct
QVQLQQSGAELARPGASVKMSCKTSGYTFTRYTMHWVKQRPGQGLEWIGYINPSRGYTNYNQKFKDKATLTTDKSSSTAYMQLSSLTSEDSAVYYCARYYDDHYSLDYWGQGTTLTVSSASTKGPSVFPLAPSSKSTSGGTAALGCLVKDYFPEPVTVSWNSGALTSGVHTCPAVLQSSGLYSLSSVVTVPSSSLGTQTYICNVNHKPSNTKVDKKVEPKSSDKTHTGGGGSGGGGSGGGGSQVQLQESGGGLVQPGESLRLSCAASGIAFEVFNMGWYRQAPGKQRELVATITNSGATNYADSVKGRFTISRDNAKDTLYLQMNSLKPEDTAVYYCNAQNSWRNIWGQGTQVTVSSGGHHHHHH

SEQ ID NO: 329 - protein, 343 aa, synthetic construct
QIVLTQSPSSLSASLGEKVTMTCRASSSVSYMNWYQQKPGTSPKRWIYDTSKVASGVPDRFSGSGSGTSYSLTISSMEAEDAATYYCQQWSSNPLTFGAGTKLELKRTVAAPSVFIFPPSDEQLKSGTASVVCLLNNFYPREAKVQWKVDNALQSGNSQESVTEQDSKDSTYSLCSTLTLSKADYEKHKVYACEVTHQGLSSPVTKSFNRGESGGGGSGGGGSGGGGSQVQLQESGGGLVQPGESLRLSCAASGIAFEVFNMGWYRQAPGKQRELVATITNSGATNYADSVKGRFTISRDNAKDTLYLQMNSLKPEDTAVYYCNAQNSWRNIWGQGTQVTVSS

SEQ ID NO: 330 - protein, 435 aa, synthetic construct
QVQLQQSGAELARPGASVKMSCKTSGYTFTRYTMHWVKQRPGQGLEWIGYINPSRGYTNYNQKFKDKATLTTDKSSSTAYMQLSSLTSEDSAVYYCARYYDDHYSLDYWGQGTTLTVSSASTKGPSVFPLAPSSKSTSGGTAALGCLVKDYFPEPVTVSWNSGALTSGVHTCPAVLQSSGLYSLSSVVTVPSSSLGTQTYICNVNHKPSNTKVDKKVEPKSSDKTHTGGGGSGGGGSGGGGSALPKAVVKLDPPWIQVLKEDMVTLMCEGTHNPGNSSTQWFHNGRSIRSQVQASYTFKATVNDSGEYRCQMEQTRLSDPVDLGVISDWLLLQTPQRVFLEGETITLRCHSWRNKLLNRISFFHNEKSVRYHHYKSNFSIPKANHSHSGDYYCKGSLGSTQHQSKPVTITVQDPATTSSISLVWYHTGGHHHHHH

SEQ ID NO: 331 - protein, 413 aa, synthetic construct
QIVLTQSPSSLSASLGEKVTMTCRASSSVSYMNWYQQKPGTSPKRWIYDTSKVASGVPDRFSGSGSGTSYSLTISSMEAEDAATYYCQQWSSNPLTFGAGTKLELKRTVAAPSVFIFPPSDEQLKSGTASVVCLLNNFYPREAKVQWKVDNALQSGNSQESVTEQDSKDSTYSLCSTLTLSKADYEKHKVYACEVTHQGLSSPVTKSFNRGESGGGGSGGGGSGGGGSALPKAVVKLDPPWIQVLKEDMVTLMCEGTHNPGNSSTQWFHNGRSIRSQVQASYTFKATVNDSGEYRCQMEQTRLSDPVDLGVISDWLLLQTPQRVFLEGETITLRCHSWRNKLLNRISFFHNEKSVRYHHYKSNFSIPKANHSHSGDYYCKGSLGSTQHQSKPVTITVQDPATTSSISLVWYHT

SEQ ID NO: 332 - protein, 428 aa, synthetic construct
QVQLQQSGAELARPGASVKMSCKTSGYTFTRYTMHWVKQRPGQGLEWIGYINPSRGYTNYNQKFKDKATLTTDKSSSTAYMQLSSLTSEDSAVYYCARYYDDHYSLDYWGQGTTLTVSSASTKGPSVFPLAPSSKSTSGGTAALGCLVKDYFPEPVTVSWNSGALTSGVHTCPAVLQSSGLYSLSSVVTVPSSSLGTQTYICNVNHKPSNTKVDKKVEPKSSDKTHTGGGGSGGGGSGGGGSTHDLPKAVVKLEPPWIQVLKEDTVTLTCEGTHNPGNSSTQWFHNGRSIRSQVQASYTFKATVNDSGEYRCQMEQTRLSDPVDLGVISDWLLLQTPQLVFLEGETITLRCHSWRNKLLNRISFFHNEKSVRYHHYSSNFSIPKANHSHSGDYYCKGSLGRTLHQSKPVTITVQGPKSSRGGHHHHHH

SEQ ID NO: 333 - protein, 406 aa, synthetic construct
QIVLTQSPSSLSASLGEKVTMTCRASSSVSYMNWYQQKPGTSPKRWIYDTSKVASGVPDRFSGSGSGTSYSLTISSMEAEDAATYYCQQWSSNPLTFGAGTKLELKRTVAAPSVFIFPPSDEQLKSGTASVVCLLNNFYPREAKVQWKVDNALQSGNSQESVTEQDSKDSTYSLCSTLTLSKADYEKHKVYACEVTHQGLSSPVTKSFNRGESGGGGSGGGGSGGGGSTHDLPKAVVKLEPPWIQVLKEDTVTLTCEGTHNPGNSSTQWFHNGRSIRSQVQASYTFKATVNDSGEYRCQMEQTRLSDPVDLGVISDWLLLQTPQLVFLEGETITLRCHSWRNKLLNRISFFHNEKSVRYHHYSSNFSIPKANHSHSGDYYCKGSLGRTLHQSKPVTITVQGPKSSR

SEQ ID NO: 334 - protein, 528 aa, synthetic construct
QVQLQESGGGLVQAGGSLRLSCAASGRAVGNYIIGWFRQAPGKEREFVATTTRDGGSTFYADSVKGRFTISRDNAKNTVNLQMNSLEPEDTAVYYCAAKSWSVPLRPTSADFDSWGQGTQVTVSSGGGGSGGGGSGGGGSQVQLQESGGGLVQAGGSLRLSCAASGRAVGNYIIGWFRQAPGKEREFVATTTRDGGSTFYADSVKGRFTISRDNAKNTVNLQMNSLEPEDTAVYYCAAKSWSVPLRPTSADFDSWGQGTQVTVSSGGGGSGGGGSGGGGSQVQLQQSGAELARPGASVKMSCKTSGYTFTRYTMHWVKQRPGQGLEWIGYINPSRGYTNYNQKFKDKATLTTDKSSSTAYMQLSSLTSEDSAVYYCARYYDDHYSLDYWGQGTTLTVSSGGGGSGGGGSGGGGSQIVLTQSPSSLSASLGEKVTMTCRASSSVSYMNWYQQKPGTSPKRWIYDTSKVASGVPDRFSGSGSGTSYSLTISSMEAEDAATYYCQQWSSNPLTFGAGTKLELKGGHHHHHH

SEQ ID NO: 335 - protein, 508 aa, synthetic construct
QVQLQESGGGLVQPGESLRLSCAASGIAFEVFNMGWYRQAPGKQRELVATITNSGATNYADSVKGRFTISRDNAKDTLYLQMNSLKPEDTAVYYCNAQNSWRNIWGQGTQVTVSSGGGGSGGGGSGGGGSQVQLQESGGGLVQPGESLRLSCAASGIAFEVFNMGWYRQAPGKQRELVATITNSGATNYADSVKGRFTISRDNAKDTLYLQMNSLKPEDTAVYYCNAQNSWRNIWGQGTQVTVSSGGGGSGGGGSGGGGSQVQLQQSGAELARPGASVKMSCKTSGYTFTRYTMHWVKQRPGQGLEWIGYINPSRGYTNYNQKFKDKATLTTDKSSSTAYMQLSSLTSEDSAVYYCARYYDDHYSLDYWGQGTTLTVSSGGGGSGGGGSGGGGSQIVLTQSPSSLSASLGEKVTMTCRASSSVSYMNWYQQKPGTSPKRWIYDTSKVASGVPDRFSGSGSGTSYSLTISSMEAEDAATYYCQQWSSNPLTFGAGTKLELKGGHHHHHH

SEQ ID NO: 336 - protein, 117 aa, synthetic construct
QVQLVQPGAEVVKPGASVKMSCKASGYTFTNYWINWVKQRPGQGLEWIGDIYPGGGITNYNEKFKTKATLTLDTSTSTVYMELSSLRSEDTAVYYCSRSYGKYFDYWGQGTLLTVSS

SEQ ID NO: 337 - protein, 107 aa, synthetic construct
DIQMTQSPSSMYASVGERVTITCKASQDIKSYLTWYQKKPGKSPKTLIFYSTRLADGVPSRFSGSGSGQDFSLTISSLEPEDTATYYCLQHDESPFTFGGGTKLEIK

SEQ ID NO: 338 - protein, 117 aa, synthetic construct
QVQLVQSGAEVKKPGASVKVSCKASGYTFTNYWINWVRQAPGQGLEWMGDIYPGGGITNYAQKFQGRVTMTRDTSISTAYMELSSLRSEDTAVYYCARSYGKYFDYWGQGTLVTVSS

SEQ ID NO: 339 - protein, 107 aa, synthetic construct
DIQMTQSPSSLSASVGDRVTITCKASQDIKSYLTWYQQKPGKAPKLLIYYSTRLADGVPSRFSGSGSGTDFTLTISSLQPEDFATYYCLQHDESPFTFGGGTKVEIK

SEQ ID NO: 340 - protein, 117 aa, synthetic construct
QVQLVQSGAEVKKPGASVKVSCKASGYTFTNYWINWVRQAPGQGLEWIGDIYPGGGITNYNEKFKTKATLTLDTSTSTVYMELSSLTSEDTAVYYCSRSYGKYFDYWGQGTLVTVSS

SEQ ID NO: 341 - protein, 107 aa, synthetic construct
DIQMTQSPSSLSASVGDRVTITCKASQDIKSYLTWYQQKPGKAPKTLIFYSTRLADGVPSRFSGSGSGQDFTLTISSLQPEDFATYYCLQHDESPFTFGGGTKVEIK

SEQ ID NO: 342 - protein, 233 aa, synthetic construct
QVQLVQPGAEVVKPGASVKMSCKASGYTFTNYWINWVKQRPGQGLEWIGDIYPGGGITNYNEKFKTKATLTLDTSTSTVYMELSSLRSEDTAVYYCSRSYGKYFDYWGQGTLLTVSSASTKGPSVFPLAPSSKSTSGGTAALGCLVKDYFPEPVTVSWNSGALTSGVHTCPAVLQSSGLYSLSSVVTVPSSSLGTQTYICNVNHKPSNTKVDKKVEPKSSDKTHTGGHHHHHH

SEQ ID NO: 343 - protein, 473 aa, synthetic construct
DIQMTQSPSSMYASVGERVTITCKASQDIKSYLTWYQKKPGKSPKTLIFYSTRLADGVPSRFSGSGSGQDFSLTISSLEPEDTATYYCLQHDESPFTFGGGTKLEIKRTVAAPSVFIFPPSDEQLKSGTASVVCLLNNFYPREAKVQWKVDNALQSGNSQESVTEQDSKDSTYSLCSTLTLSKADYEKHKVYACEVTHQGLSSPVTKSFNRGESGGGGSGGGGSGGGGSDIQMTQSPSSLSASVGDRVTITCRASQDIRNYLNWYQQKPGKAPKLLIYYTSRLESGVPSRFSGSGSGTDYTLTISSLQPEDFATYYCQQGNTLPWTFGQGTKVEIKGGGGSGGGGSGGGGSEVQLVESGGGLVQPGGSLRLSCAASGYSFTGYTMNWVRQAPGKGLEWVALINPTKGVSTYNQKFKDRFTISVDKSKNTAYLQMNSLRAEDTAVYYCARSGYYGDSDWYFDVWGQGTLVTVSS

SEQ ID NO: 344 - protein, 233 aa, synthetic construct
QVQLVQSGAEVKKPGASVKVSCKASGYTFTNYWINWVRQAPGQGLEWMGDIYPGGGITNYAQKFQGRVTMTRDTSISTAYMELSSLRSEDTAVYYCARSYGKYFDYWGQGTLVTVSSASTKGPSVFPLAPSSKSTSGGTAALGCLVKDYFPEPVTVSWNSGALTSGVHTCPAVLQSSGLYSLSSVVTVPSSSLGTQTYICNVNHKPSNTKVDKKVEPKSSDKTHTGGHHHHHH

SEQ ID NO: 345 - protein, 473 aa, synthetic construct
DIQMTQSPSSLSASVGDRVTITCKASQDIKSYLTWYQQKPGKAPKLLIYYSTRLADGVPSRFSGSGSGTDFTLTISSLQPEDFATYYCLQHDESPFTFGGGTKVEIKRTVAAPSVFIFPPSDEQLKSGTASVVCLLNNFYPREAKVQWKVDNALQSGNSQESVTEQDSKDSTYSLCSTLTLSKADYEKHKVYACEVTHQGLSSPVTKSFNRGESGGGGSGGGGSGGGGSDIQMTQSPSSLSASVGDRVTITCRASQDIRNYLNWYQQKPGKAPKLLIYYTSRLESGVPSRFSGSGSGTDYTLTISSLQPEDFATYYCQQGNTLPWTFGQGTKVEIKGGGGSGGGGSGGGGSEVQLVESGGGLVQPGGSLRLSCAASGYSFTGYTMNWVRQAPGKGLEWVALINPTKGVSTYNQKFKDRFTISVDKSKNTAYLQMNSLRAEDTAVYYCARSGYYGDSDWYFDVWGQGTLVTVSS

SEQ ID NO: 346 - protein, 233 aa, synthetic construct
QVQLVQSGAEVKKPGASVKVSCKASGYTFTNYWINWVRQAPGQGLEWIGDIYPGGGITNYNEKFKTKATLTLDTSTSTVYMELSSLTSEDTAVYYCSRSYGKYFDYWGQGTLVTVSSASTKGPSVFPLAPSSKSTSGGTAALGCLVKDYFPEPVTVSWNSGALTSGVHTCPAVLQSSGLYSLSSVVTVPSSSLGTQTYICNVNHKPSNTKVDKKVEPKSSDKTHTGGHHHHHH

SEQ ID NO: 347 - protein, 473 aa, synthetic construct
DIQMTQSPSSLSASVGDRVTITCKASQDIKSYLTWYQQKPGKAPKTLIFYSTRLADGVPSRFSGSGSGQDFTLTISSLQPEDFATYYCLQHDESPFTFGGGTKVEIKRTVAAPSVFIFPPSDEQLKSGTASVVCLLNNFYPREAKVQWKVDNALQSGNSQESVTEQDSKDSTYSLCSTLTLSKADYEKHKVYACEVTHQGLSSPVTKSFNRGESGGGGSGGGGSGGGGSDIQMTQSPSSLSASVGDRVTITCRASQDIRNYLNWYQQKPGKAPKLLIYYTSRLESGVPSRFSGSGSGTDYTLTISSLQPEDFATYYCQQGNTLPWTFGQGTKVEIKGGGGSGGGGSGGGGSEVQLVESGGGLVQPGGSLRLSCAASGYSFTGYTMNWVRQAPGKGLEWVALINPTKGVSTYNQKFKDRFTISVDKSKNTAYLQMNSLRAEDTAVYYCARSGYYGDSDWYFDVWGQGTLVTVSS

SEQ ID NO: 348 - protein, 129 aa, synthetic construct
QVQLVESGGGLVQPGGSLRLSCAASGNTLSRYAMGWFRQAPGQGLEAVAAIRWNNGATYYADSVKGRFTISRDNSKNTLYLQMNSLRAEDTAVYYCAGRFLGYASSNAYHEALYNYDYWGQGTLVTVSS

SEQ ID NO: 349 - protein, 540 aa, synthetic construct
QVQLQESGGGLVQAGGSLRLSCAVSGNTLSRYAMGWFRQTPGNEREFVAAIRWNNGATYYADSVEGRFTISRDSGKNTVYLQMNNLKPEDTAVYYCAGRFLGYASSNAYHEALYNYDYWGQGTQVTVSSGGGGSGGGGSGGGGSQVQLQESGGGLVQAGGSLRLSCAVSGNTLSRYAMGWFRQTPGNEREFVAAIRWNNGATYYADSVEGRFTISRDSGKNTVYLQMNNLKPEDTAVYYCAGRFLGYASSNAYHEALYNYDYWGQGTQVTVSSGGGGSGGGGSGGGGSDIQMTQSPSSLSASVGDRVTITCRASQDIRNYLNWYQQKPGKAPKLLIYYTSRLESGVPSRFSGSGSGTDYTLTISSLQPEDFATYYCQQGNTLPWTFGQGTKVEIKGGGGSGGGGSGGGGSEVQLVESGGGLVQPGGSLRLSCAASGYSFTGYTMNWVRQAPGKGLEWVALINPTKGVSTYNQKFKDRFTISVDKSKNTAYLQMNSLRAEDTAVYYCARSGYYGDSDWYFDVWGQGTLVTVSSGGHHHHHH

SEQ ID NO: 350 - protein, 648 aa, synthetic construct
GLQKAVVNLDPKWVRVLEEDSVTLRCQGTFSPEDNSIKWFHNESLIPHQDANYVIQSARVKDSGMYRCQTALSTISDPVQLEVHMGWLLLQTTKWLFQEGDPIHLRCHSWQNRPVRKVTYLQNGKGKKYFHENSELLIPKATHNDSGSYFCRGLIGHNNKSSASFRISLGDPGSPSMFPPWHQGGGGSGGGGSGGGGSGLQKAVVNLDPKWVRVLEEDSVTLRCQGTFSPEDNSIKWFHNESLIPHQDANYVIQSARVKDSGMYRCQTALSTISDPVQLEVHMGWLLLQTTKWLFQEGDPIHLRCHSWQNRPVRKVTYLQNGKGKKYFHENSELLIPKATHNDSGSYFCRGLIGHNNKSSASFRISLGDPGSPSMFPPWHQGGGGSGGGGSGGGGSDIQMTQSPSSLSASVGDRVTITCRASQDIRNYLNWYQQKPGKAPKLLIYYTSRLESGVPSRFSGSGSGTDYTLTISSLQPEDFATYYCQQGNTLPWTFGQGTKVEIKGGGGSGGGGSGGGGSEVQLVESGGGLVQPGGSLRLSCAASGYSFTGYTMNWVRQAPGKGLEWVALINPTKGVSTYNQKFKDRFTISVDKSKNTAYLQMNSLRAEDTAVYYCARSGYYGDSDWYFDVWGQGTLVTVSSGGHHHHHH

SEQ ID NO: 351 - protein, 115 aa, synthetic construct [sequence omitted]

SEQ ID NO: 352 - protein, 518 aa, synthetic construct
QVQLQESGGGLVQAGDSLRISCRASGLTVNDLYMGWFRQAPGKEREFVGRVTPGDNTDYTYYVDSVKGRFTISRDSAKNTVYLQMNSLKLEDTAVYLCAGRRFGSSEWDYWGQGTQVTVSSGGGGSGGGGSGGGGSDIQMTQSPSSLSASVGDRVTITCRASQDIRNYLNWYQQKPGKAPKLLIYYTSRLESGVPSRFSGSGSGTDYTLTISSLQPEDFATYYCQQGNTLPWTFGQGTKVEIKGGGGSGGGGSGGGGSEVQLVESGGGLVQPGGSLRLSCAASGYSFTGYTMNWVRQAPGKGLEWVALINPTKGVSTYNQKFKDRFTISVDKSKNTAYLQMNSLRAEDTAVYYCARSGYYGDSDWYFDVWGQGTLVTVSSGGGGSGGGGSGGGGSAVQLVESGGGLVQPGNSLRLSCAASGFTFRSFGMSWVRQAPGKEPEWVSSISGSGSDTLYADSVKGRFTISRDNAKTTLYLQMNSLKPEDTAVYYCTIGGSLSRSSQGTQVTVSSGGHHHHHH

SEQ ID NO: 353 - protein, 518 aa, synthetic construct
QVQLQESGGGLVQAGDSLRISCRASGLTVNDLYMGWFRQAPGKEREFVGRVTPGDNTDYTYYVDSVKGRFTISRDSAKNTVYLQMNSLKLEDTAVYLCAGRRFGSSEWDYWGQGTQVTVSSGGGGSGGGGSGGGGSDIQMTQSPSSLSASVGDRVTITCRASQDIRNYLNWYQQKPGKAPKLLIYYTSRLESGVPSRFSGSGSGTDYTLTISSLQPEDFATYYCQQGNTLPWTFGQGTKVEIKGGGGSGGGGSGGGGSEVQLVESGGGLVQPGGSLRLSCAASGYSFTGYTMNWVRQAPGKGLEWVALINPTKGVSTYNQKFKDRFTISVDKSKNTAYLQMNSLRAEDTAVYYCARSGYYGDSDWYFDVWGQGTLVTVSSGGGGSGGGGSGGGGSQVQLQESGGGLVQPGGSLRLSCEASGFTFSRFGMTWVRQAPGKGVEWVSGISSLGDSTLYADSVKGRFTISRDNAKNTLYLQMNSLKPEDTAVYYCTIGGSLNPGGQGTQVTVSSGGHHHHHH

SEQ ID NO: 354 - protein, 492 aa, synthetic construct
QVQLQQSGAELARPGASVKMSCKTSGYTFTRYTMHWVKQRPGQGLEWIGYINPSRGYTNYNQKFKDKATLTTDKSSSTAYMQLSSLTSEDSAVYYCARYYDDHYSLDYWGQGTTLTVSSASTKGPSVFPLASSSKSTSGGTAALGCLVKDYFPEPVTVSWNSGALTSGVHTCPAVLQSSGLYSLSSVVTVPSSSLGTQTYICNVNHEPSNTKVDKKVEPKSSDKTHTGGGGSGGGGSGGGGSEVQLQQSGAELVKPGASVKLSCTGSGFNIKDTYIYWLKQRPEQGLEWIGRIDPANGDTEYDPKFQGKATIRADTSSNTAYLQLSSLTSDDTVVYYCARKYGNNRAWFAFWGQGTLVTVSAGGGGSGGGGSGGGGSQIVMTQTPKSLLVSAGDRVTITCKASQSVSDDVAWYQQKPGQSPKLLIYFASYRYTGVPDRFTGSGYGTDFTLTISSVQADDAAVYYCQQDYSSPLTFGAGTKVELKGGHHHHHH

SEQ ID NO: 355 - protein, 470 aa, synthetic construct
QIVLTQSPSSLSASLGEKVTMTCRASSSVSYMNWYQQKPGTSPKRWIYDTSKVASGVPDRFSGSGSGTSYSLTISSMEAEDAATYYCQQWSSNPLTFGAGTKLELKRTVAAPSVFIFPPSDEQLKSGTASVVCLLNNFYPREAKVQWKVDNALQSGNSQESVTEQDSKDSTYSLCSTLTLSKADYEKHKVYACEVTHQGLSSPVTKSFNRGESGGGGSGGGGSGGGGSEVQLQQSGAELVKPGASVKLSCTGSGFNIKDTYIYWLKQRPEQGLEWIGRIDPANGDTEYDPKFQGKATIRADTSSNTAYLQLSSLTSDDTVVYYCARKYGNNRAWFAFWGQGTLVTVSAGGGGSGGGGSGGGGSQIVMTQTPKSLLVSAGDRVTITCKASQSVSDDVAWYQQKPGQSPKLLIYFASYRYTGVPDRFTGSGYGTDFTLTISSVQADDAAVYYCQQDYSSPLTFGAGTKVELK

SEQ ID NO: 356 - protein, 314 aa, synthetic construct
ASTKGPSVFPLAPSSKSTSGGTAALGCLVKDYFPEPVTVSWNSGALTSGVHTCPAVLQSSGLYSLSSVVTVPSSSLGTQTYICNVNHKPSNTKVDKKVEPKSSDKTHTGGGGSGGGGSGGGGSAAPPKAVLKLEPPWINVLQEDSVTLTCQGARSPESDSIQWFHNGNLIPTHTQPSYRFKANNNDSGEYTCQTGQTSLSDPVHLTVLSEWLVLQTPHLEFQEGETIMLRCHSWKDKPLVKVTFFQNGKSQKFSHLDPTFSIPQANHSHSGDYHCTGNIGYTLFSSKPVTITVQVPSMGSSSPMGIGGHHHHHH

SEQ ID NO: 357 - protein, 305 aa, synthetic construct
RTVAAPSVFIFPPSDEQLKSGTASVVCLLNNFYPREAKVQWKVDNALQSGNSQESVTEQDSKDSTYSLCSTLTLSKADYEKHKVYACEVTHQGLSSPVTKSFNRGESGGGGSGGGGSGGGGSAAPPKAVLKLEPPWINVLQEDSVTLTCQGARSPESDSIQWFHNGNLIPTHTQPSYRFKANNNDSGEYTCQTGQTSLSDPVHLTVLSEWLVLQTPHLEFQEGETIMLRCHSWKDKPLVKVTFFQNGKSQKFSHLDPTFSIPQANHSHSGDYHCTGNIGYTLFSSKPVTITVQVPSMGSSSPMGI

SEQ ID NO: 358 - protein, 115 aa, synthetic construct
EVQLQQSGPELVKPGASVKMSCKASGYTFTSYVIQWVKQKPGQGLEWIGSINPYNDYTKYNEKFKGKATLTSDKSSITAYMEFSSLTSEDSALYYCARWGDGNYWGRGTTLTVSS

SEQ ID NO: 359 - protein, 106 aa, synthetic construct
DIEMTQSPAIMSASLGERVTMTCTASSSVSSSYFHWYQQKPGSSPKLCIYSTSNLASGVPPRFSGSGSTSYSLTISSMEAEDAATYFCHQYHRSPTFGGGTKLETK

SEQ ID NO: 360 - protein, 121 aa, synthetic construct
DVQLQESGPGLVKPSQSLSLTCTVTGYSITSDYAWNWIRQFPGNKLEWMGYIRYSGSTSYNPSLKSRISITRDTSKNQFFLQLNSVTTEDTATYYCARDWPRPSYWYFDVWGAGTTVTVSS

SEQ ID NO: 361 - protein, 107 aa, synthetic construct
DIQTTQTTSSLSASLGDRVTISCRAGQDISNYLNWYQQKPDGTVKLLIYYTSRLHSGVPSRFSGSGSGTDYSLTISNLEQEDIATYFCQQGHTLPWTFGGGTKLEIK

SEQ ID NO: 362 - protein, 121 aa, synthetic construct
QVQLQESGPGLVKPSETLSLTCAVSGFSLTSYGVHWIRQPPGKGLEWLGVIWPGGGTNFNSALMSRLTISEDTSKNQVSLKLSSVTAADTAVYYCARDRAYGNYLYAMDYWGQGTLVTVSS

SEQ ID NO: 363 - protein, 111 aa, synthetic construct
DIQMTQSPSSLSASVGDRVTITCRASESVEYYVTSLMQWYQQKPGKAPKLLIYAASNVDSGVPSRFSGSGSGTDFTLTISSLQPEDIATYYCQQSRKVPFTFGGGTKVEIK

SEQ ID NO: 364 - protein, 435 aa, synthetic construct
QVQLKESGPGLVAPSQSLSITCTVSGFSLTGYGVNWVRQPPGKGLEWLGMIWGDGSTDYNSALKSRLSITKDNSKSQVFLKMNSLQTDDTARYYCARDGYSNFHYYVMDYWGQGTSVTVSSASTKGPSVFPLAPSSKSTSGGTAALGCLVKDYFPEPVTVSWNSGALTSGVHTCPAVLQSSGLYSLSSVVTVPSSSLGTQTYICNVNHKPSNTKVDKKVEPKSSDKTHTGGGGSGGGGSGGGGSAAPPKAVLKLEPPWINVLQEDSVTLTCQGARSPESDSIQWFHNGNLIPTHTQPSYRFKANNNDSGEYTCQTGQTSLSDPVHLTVLSEWLVLQTPHLEFQEGETIMLRCHSWKDKPLVKVTFFQNGKSQKFSHLDPTFSIPQANHSHSGDYHCTGNIGYTLFSSKPVTITVQVPSMGSSSPMGIGGHHHHHH

SEQ ID NO: 365 - protein, 416 aa, synthetic construct
DIVLTQSPASLAVSLGQRATISCRASESVEYYVTSLMQWYQQKPGQPPKLLISAASNVESGVPARFSGSGSGTDFSLNIHPVEEDDIAMYFCQQSRKVPWTFGGGTKLEIKRTVAAPSVFIFPPSDEQLKSGTASVVCLLNNFYPREAKVQWKVDNALQSGNSQESVTEQDSKDSTYSLCSTLTLSKADYEKHKVYACEVTHQGLSSPVTKSFNRGESGGGGSGGGGSGGGGSAAPPKAVLKLEPPWINVLQEDSVTLTCQGARSPESDSIQWFHNGNLIPTHTQPSYRFKANNNDSGEYTCQTGQTSLSDPVHLTVLSEWLVLQTPHLEFQEGETIMLRCHSWKDKPLVKVTFFQNGKSQKFSHLDPTFSIPQANHSHSGDYHCTGNIGYTLFSSKPVTITVQVPSMGSSSPMGI

SEQ ID NO: 366 - protein, 434 aa, synthetic construct
QVQLVQSGAEVKKPGASVKVSCKASGYTFTSYYIHWVRQAPGQGLEWIGCIYPGNVNTNYNEKFKDRATLTVDTSISTAYMELSRLRSDDTAVYFCTRSHYGLDWNFDVWGQGTTVTVSSASTKGPSVFPLAPSSKSTSGGTAALGCLVKDYFPEPVTVSWNSGALTSGVHTCPAVLQSSGLYSLSSVVTVPSSSLGTQTYICNVNHKPSNTKVDKKVEPKSSDKTHTGGGGSGGGGSGGGGSAAPPKAVLKLEPPWINVLQEDSVTLTCQGARSPESDSIQWFHNGNLIPTHTQPSYRFKANNNDSGEYTCQTGQTSLSDPVHLTVLSEWLVLQTPHLEFQEGETIMLRCHSWKDKPLVKVTFFQNGKSQKFSHLDPTFSIPQANHSHSGDYHCTGNIGYTLFSSKPVTITVQVPSMGSSSPMGIGGHHHHHH

SEQ ID NO: 367 - protein, 412 aa, synthetic construct
DIQMTQSPSSLSASVGDRVTITCHASQNIYVWLNWYQQKPGKAPKLLIYKASNLHTGVPSRFSGSGSGTDFTLTISSLQPEDFATYYCQQGQTYPYTFGGGTKVEIKRTVAAPSVFIFPPSDEQLKSGTASVVCLLNNFYPREAKVQWKVDNALQSGNSQESVTEQDSKDSTYSLCSTLTLSKADYEKHKVYACEVTHQGLSSPVTKSFNRGESGGGGSGGGGSGGGGSAAPPKAVLKLEPPWINVLQEDSVTLTCQGARSPESDSIQWFHNGNLIPTHTQPSYRFKANNNDSGEYTCQTGQTSLSDPVHLTVLSEWLVLQTPHLEFQEGETIMLRCHSWKDKPLVKVTFFQNGKSQKFSHLDPTFSIPQANHSHSGDYHCTGNIGYTLFSSKPVTITVQVPSMGSSSPMGI

SEQ ID NO: 368 - protein, 434 aa, synthetic construct
QVKLQQSGPGLVTPSQSLSITCTVSGFSLSDYGVHWVRQSPGQGLEWLGVIWAGGGTNYNSALMSRKSISKDNSKSQVFLKMNSLQADDTAVYYCARDKGYSYYYSMDYWGQGTTVTVSSASTKGPSVFPLAPSSKSTSGGTAALGCLVKDYFPEPVTVSWNSGALTSGVHTCPAVLQSSGLYSLSSVVTVPSSSLGTQTYICNVNHKPSNTKVDKKVEPKSSDKTHTGGGGSGGGGSGGGGSAAPPKAVLKLEPPWINVLQEDSVTLTCQGARSPESDSIQWFHNGNLIPTHTQPSYRFKANNNDSGEYTCQTGQTSLSDPVHLTVLSEWLVLQTPHLEFQEGETIMLRCHSWKDKPLVKVTFFQNGKSQKFSHLDPTFSIPQANHSHSGDYHCTGNIGYTLFSSKPVTITVQVPSMGSSSPMGIGGHHHHHH

SEQ ID NO: 369 - protein, 416 aa, synthetic construct
DIELTQSPASLAVSLGQRATISCRASESVEYYVTSLMQWYQQKPGQPPKLLIFAASNVESGVPARFSGSGSGTNFSLNIHPVDEDDVAMYFCQQSRKVPYTFGGGTKLEIKRTVAAPSVFIFPPSDEQLKSGTASVVCLLNNFYPREAKVQWKVDNALQSGNSQESVTEQDSKDSTYSLCSTLTLSKADYEKHKVYACEVTHQGLSSPVTKSFNRGESGGGGSGGGGSGGGGSAAPPKAVLKLEPPWINVLQEDSVTLTCQGARSPESDSIQWFHNGNLIPTHTQPSYRFKANNNDSGEYTCQTGQTSLSDPVHLTVLSEWLVLQTPHLEFQEGETIMLRCHSWKDKPLVKVTFFQNGKSQKFSHLDPTFSIPQANHSHSGDYHCTGNIGYTLFSSKPVTITVQVPSMGSSSPMGI

SEQ ID NO: 370 - protein, 429 aa, synthetic construct
EVQLQQSGPELVKPGASVKMSCKASGYTFTSYVIQWVKQKPGQGLEWIGSINPYNDYTKYNEKFKGKATLTSDKSSITAYMEFSSLTSEDSALYYCARWGDGNYWGRGTTLTVSSASTKGPSVFPLAPSSKSTSGGTAALGCLVKDYFPEPVTVSWNSGALTSGVHTCPAVLQSSGLYSLSSVVTVPSSSLGTQTYICNVNHKPSNTKVDKKVEPKSSDKTHTGGGGSGGGGSGGGGSAAPPKAVLKLEPPWINVLQEDSVTLTCQGARSPESDSIQWFHNGNLIPTHTQPSYRFKANNNDSGEYTCQTGQTSLSDPVHLTVLSEWLVLQTPHLEFQEGETIMLRCHSWKDKPLVKVTFFQNGKSQKFSHLDPTFSIPQANHSHSGDYHCTGNIGYTLFSSKPVTITVQVPSMGSSSPMGIGGHHHHHH

SEQ ID NO: 371 - protein, 411 aa, synthetic construct
DIEMTQSPAIMSASLGERVTMTCTASSSVSSSYFHWYQQKPGSSPKLCIYSTSNLASGVPPRFSGSGSTSYSLTISSMEAEDAATYFCHQYHRSPTFGGGTKLETKRTVAAPSVFIFPPSDEQLKSGTASVVCLLNNFYPREAKVQWKVDNALQSGNSQESVTEQDSKDSTYSLCSTLTLSKADYEKHKVYACEVTHQGLSSPVTKSFNRGESGGGGSGGGGSGGGGSAAPPKAVLKLEPPWINVLQEDSVTLTCQGARSPESDSIQWFHNGNLIPTHTQPSYRFKANNNDSGEYTCQTGQTSLSDPVHLTVLSEWLVLQTPHLEFQEGETIMLRCHSWKDKPLVKVTFFQNGKSQKFSHLDPTFSIPQANHSHSGDYHCTGNIGYTLFSSKPVTITVQVPSMGSSSPMGI

SEQ ID NO: 372 - protein, 435 aa, synthetic construct
DVQLQESGPGLVKPSQSLSLTCTVTGYSITSDYAWNWIRQFPGNKLEWMGYIRYSGSTSYNPSLKSRISITRDTSKNQFFLQLNSVTTEDTATYYCARDWPRPSYWYFDVWGAGTTVTVSSASTKGPSVFPLAPSSKSTSGGTAALGCLVKDYFPEPVTVSWNSGALTSGVHTCPAVLQSSGLYSLSSVVTVPSSSLGTQTYICNVNHKPSNTKVDKKVEPKSSDKTHTGGGGSGGGGSGGGGSAAPPKAVLKLEPPWINVLQEDSVTLTCQGARSPESDSIQWFHNGNLIPTHTQPSYRFKANNNDSGEYTCQTGQTSLSDPVHLTVLSEWLVLQTPHLEFQEGETIMLRCHSWKDKPLVKVTFFQNGKSQKFSHLDPTFSIPQANHSHSGDYHCTGNIGYTLFSSKPVTITVQVPSMGSSSPMGIGGHHHHHH

SEQ ID NO: 373 - protein, 412 aa, synthetic construct
DIQTTQTTSSLSASLGDRVTISCRAGQDISNYLNWYQQKPDGTVKLLIYYTSRLHSGVPSRFSGSGSGTDYSLTISNLEQEDIATYFCQQGHTLPWTFGGGTKLEIKRTVAAPSVFIFPPSDEQLKSGTASVVCLLNNFYPREAKVQWKVDNALQSGNSQESVTEQDSKDSTYSLCSTLTLSKADYEKHKVYACEVTHQGLSSPVTKSFNRGESGGGGSGGGGSGGGGSAAPPKAVLKLEPPWINVLQEDSVTLTCQGARSPESDSIQWFHNGNLIPTHTQPSYRFKANNNDSGEYTCQTGQTSLSDPVHLTVLSEWLVLQTPHLEFQEGETIMLRCHSWKDKPLVKVTFFQNGKSQKFSHLDPTFSIPQANHSHSGDYHCTGNIGYTLFSSKPVTITVQVPSMGSSSPMGI

SEQ ID NO: 374 - protein, 435 aa, synthetic construct
QVQLQESGPGLVKPSETLSLTCAVSGFSLTSYGVHWIRQPPGKGLEWLGVIWPGGGTNFNSALMSRLTISEDTSKNQVSLKLSSVTAADTAVYYCARDRAYGNYLYAMDYWGQGTLVTVSSASTKGPSVFPLAPSSKSTSGGTAALGCLVKDYFPEPVTVSWNSGALTSGVHTCPAVLQSSGLYSLSSVVTVPSSSLGTQTYICNVNHKPSNTKVDKKVEPKSSDKTHTGGGGSGGGGSGGGGSAAPPKAVLKLEPPWINVLQEDSVTLTCQGARSPESDSIQWFHNGNLIPTHTQPSYRFKANNNDSGEYTCQTGQTSLSDPVHLTVLSEWLVLQTPHLEFQEGETIMLRCHSWKDKPLVKVTFFQNGKSQKFSHLDPTFSIPQANHSHSGDYHCTGNIGYTLFSSKPVTITVQVPSMGSSSPMGIGGHHHHHH

SEQ ID NO: 375 - protein, 416 aa, synthetic construct
DIQMTQSPSSLSASVGDRVTITCRASESVEYYVTSLMQWYQQKPGKAPKLLIYAASNVDSGVPSRFSGSGSGTDFTLTISSLQPEDIATYYCQQSRKVPFTFGGGTKVEIKRTVAAPSVFIFPPSDEQLKSGTASVVCLLNNFYPREAKVQWKVDNALQSGNSQESVTEQDSKDSTYSLCSTLTLSKADYEKHKVYACEVTHQGLSSPVTKSFNRGESGGGGSGGGGSGGGGSAAPPKAVLKLEPPWINVLQEDSVTLTCQGARSPESDSIQWFHNGNLIPTHTQPSYRFKANNNDSGEYTCQTGQTSLSDPVHLTVLSEWLVLQTPHLEFQEGETIMLRCHSWKDKPLVKVTFFQNGKSQKFSHLDPTFSIPQANHSHSGDYHCTGNIGYTLFSSKPVTITVQVPSMGSSSPMGI

SEQ ID NO: 376 - protein, 569 aa, synthetic construct
EVQLVESGGGLVQPGGSLKLSCAASGFTFNKYAMNWVRQAPGKGLEWVARIRSKYNNYATYYADSVKDRFTISRDDSKNTAYLQMNNLKTEDTAVYYCVRHGNFGNSYISYWAYWGQGTLVTVSSASTKGPSVFPLAPSSKSTSGGTAALGCLVKDYFPEPVTVSWNSGALTSGVHTFPAVLQSSGLYSLSSVVTVPSSSLGTQTYICNVNHKPSNTKVDKKVEPKSSDKTHTGGGGSGGGGSGGGGSAAPPKAVLKLEPPWINVLQEDSVTLTCQGARSPESDSIQWFHNGNLIPTHTQPSYRFKANNNDSGEYTCQTGQTSLSDPVHLTVLSEWLVLQTPHLEFQEGETIMLRCHSWKDKPLVKVTFFQNGKSQKFSHLDPTFSIPQANHSHSGDYHCTGNIGYTLFSSKPVTITVQVPSMGSSSPMGIGGGGSGGGGSGGGGSEVQLVESGGGLVQPGNSLRLSCAASGFTFSSFGMSWVRQAPGKGLEWVSSISGSGSDTLYADSVKGRFTISRDNAKTTLYLQMNSLRPEDTAVYYCTIGGSLSRSSQGTLVTVSSGGHHHHHH

SEQ ID NO: 377 - protein, 413 aa, synthetic construct
QTVVTQEPSLTVSPGGTVTLTCGSSTGAVTSGNYPNWVQQKPGQAPRGLIGGTKFLAPGTPARFSGSLLGGKAALTLSGVQPEDEAEYYCVLWYSNRWVFGGGTKLTVLSQPKAAPSVTLFPPSSEELQANKATLVCLVSDFYPGAVTVAWKADGSPVKVGVETTKPSKQSNNKYAASSYLSLTPEQWKSHRSYSCRVTHEGSTVEKTVAPAESSGGGGSGGGGSGGGGSAAPPKAVLKLEPPWINVLQEDSVTLTCQGARSPESDSIQWFHNGNLIPTHTQPSYRFKANNNDSGEYTCQTGQTSLSDPVHLTVLSEWLVLQTPHLEFQEGETIMLRCHSWKDKPLVKVTFFQNGKSQKFSHLDPTFSIPQANHSHSGDYHCTGNIGYTLFSSKPVTITVQVPSMGSSSPMGI

SEQ ID NO: 378 - protein, 566 aa, synthetic construct
EVQLVESGGGLVQPGGSLRLSCAASGYSFTGYTMNWVRQAPGKGLEWVALINPTKGVSTYNQKFKDRFTISVDKSKNTAYLQMNSLRAEDTAVYYCARSGYYGDSDWYFDVWGQGTLVTVSSASTKGPSVFPLAPSSKSTSGGTAALGCLVKDYFPEPVTVSWNSGALTSGVHTCPAVLQSSGLYSLSSVVTVPSSSLGTQTYICNVNHKPSNTKVDKKVEPKSSDKTHTGGGGSGGGGSGGGGSAAPPKAVLKLEPPWINVLQEDSVTLTCQGARSPESDSIQWFHNGNLIPTHTQPSYRFKANNNDSGEYTCQTGQTSLSDPVHLTVLSEWLVLQTPHLEFQEGETIMLRCHSWKDKPLVKVTFFQNGKSQKFSHLDPTFSIPQANHSHSGDYHCTGNIGYTLFSSKPVTITVQVPSMGSSSPMGIGGGGSGGGGSGGGGSEVQLVESGGGLVQPGNSLRLSCAASGFTFSSFGMSWVRQAPGKGLEWVSSISGSGSDTLYADSVKGRFTISRDNAKTTLYLQMNSLRPEDTAVYYCTIGGSLSRSSQGTLVTVSSGGHHHHHH

SEQ ID NO: 379 - protein, 412 aa, synthetic construct
DIQMTQSPSSLSASVGDRVTITCRASQDIRNYLNWYQQKPGKAPKLLIYYTSRLESGVPSRFSGSGSGTDYTLTISSLQPEDFATYYCQQGNTLPWTFGQGTKVEIKRTVAAPSVFIFPPSDEQLKSGTASVVCLLNNFYPREAKVQWKVDNALQSGNSQESVTEQDSKDSTYSLCSTLTLSKADYEKHKVYACEVTHQGLSSPVTKSFNRGESGGGGSGGGGSGGGGSAAPPKAVLKLEPPWINVLQEDSVTLTCQGARSPESDSIQWFHNGNLIPTHTQPSYRFKANNNDSGEYTCQTGQTSLSDPVHLTVLSEWLVLQTPHLEFQEGETIMLRCHSWKDKPLVKVTFFQNGKSQKFSHLDPTFSIPQANHSHSGDYHCTGNIGYTLFSSKPVTITVQVPSMGSSSPMGI

SEQ ID NO: 380 - protein, 433 aa, synthetic construct
QVQLQQSGAELARPGASVKMSCKTSGYTFTRYTMHWVKQRPGQGLEWIGYINPSRGYTNYNQKFKDKATLTTDKSSSTAYMQLSSLTSEDSAVYYCARYYDDHYSLDYWGQGTTLTVSSASTKGPSVFPLAPSSKSTSGGTAALGCLVKDYFPEPVTVSWNSGALTSGVHTCPAVLQSSGLYSLSSVVTVPSSSLGTQTYICNVNHKPSNTKVDKKVEPKSSDKTHTGGGGSGGGGSGGGGSAAPPKAVLKLEPPWINVLQEDSVTLTCQGARSPESDSIQWFHNGNLIPTHTQPSYRFKANNNDSGEYTCQTGQTSLSDPVHLTVLSEWLVLQTPHLEFQEGETIMLRCHSWKDKPLVKVTFFQNGKSQKFSHLDPTFSIPQANHSHSGDYHCTGNIGYTLFSSKPVTITVQVPSMGSSSPMGIGGHHHHHH

SEQ ID NO: 381 - protein, 411 aa, synthetic construct
QIVLTQSPSSLSASLGEKVTMTCRASSSVSYMNWYQQKPGTSPKRWIYDTSKVASGVPDRFSGSGSGTSYSLTISSMEAEDAATYYCQQWSSNPLTFGAGTKLELKRTVAAPSVFIFPPSDEQLKSGTASVVCLLNNFYPREAKVQWKVDNALQSGNSQESVTEQDSKDSTYSLCSTLTLSKADYEKHKVYACEVTHQGLSSPVTKSFNRGESGGGGSGGGGSGGGGSAAPPKAVLKLEPPWINVLQEDSVTLTCQGARSPESDSIQWFHNGNLIPTHTQPSYRFKANNNDSGEYTCQTGQTSLSDPVHLTVLSEWLVLQTPHLEFQEGETIMLRCHSWKDKPLVKVTFFQNGKSQKFSHLDPTFSIPQANHSHSGDYHCTGNIGYTLFSSKPVTITVQVPSMGSSSPMGI

SEQ ID NO: 382 - protein, 433 aa, synthetic construct
QVQLVQSGAEVKKPGASVKVSCKASGYTFTRYYMHWVRQAPGQGLEWMGYINPSRGYTNYAQKFQGRVTMTRDTSISTAYMELSSLRSEDTAVYYCARYYDDHYSLDYWGQGTLVTVSSASTKGPSVFPLAPSSKSTSGGTAALGCLVKDYFPEPVTVSWNSGALTSGVHTCPAVLQSSGLYSLSSVVTVPSSSLGTQTYICNVNHKPSNTKVDKKVEPKSSDKTHTGGGGSGGGGSGGGGSAAPPKAVLKLEPPWINVLQEDSVTLTCQGARSPESDSIQWFHNGNLIPTHTQPSYRFKANNNDSGEYTCQTGQTSLSDPVHLTVLSEWLVLQTPHLEFQEGETIMLRCHSWKDKPLVKVTFFQNGKSQKFSHLDPTFSIPQANHSHSGDYHCTGNIGYTLFSSKPVTITVQVPSMGSSSPMGIGGHHHHHH

SEQ ID NO: 383 - protein, 411 aa, synthetic construct
DIQMTQSPSSLSASVGDRVTITCRASSSVSYMNWYQQKPGKAPKLLIYDTSKVASGVPSRFSGSGSGTDFTLTISSLQPEDFATYYCQQWSSNPLTFGGGTKVEIKRTVAAPSVFIFPPSDEQLKSGTASVVCLLNNFYPREAKVQWKVDNALQSGNSQESVTEQDSKDSTYSLCSTLTLSKADYEKHKVYACEVTHQGLSSPVTKSFNRGESGGGGSGGGGSGGGGSAAPPKAVLKLEPPWINVLQEDSVTLTCQGARSPESDSIQWFHNGNLIPTHTQPSYRFKANNNDSGEYTCQTGQTSLSDPVHLTVLSEWLVLQTPHLEFQEGETIMLRCHSWKDKPLVKVTFFQNGKSQKFSHLDPTFSIPQANHSHSGDYHCTGNIGYTLFSSKPVTITVQVPSMGSSSPMGI

SEQ ID NO: 384 - protein, 434 aa, synthetic construct
QVQLVQSGAEVKKPGASVKVSCKASGYTFISYTMHWVRQAPGQGLEWMGYINPRSGYTHYNQKLKDKATLTADKSASTAYMELSSLRSEDTAVYYCARSAYYDYDGFAYWGQGTLVTVSSASTKGPSVFPLAPSSKSTSGGTAALGCLVKDYFPEPVTVSWNSGALTSGVHTCPAVLQSSGLYSLSSVVTVPSSSLGTQTYICNVNHKPSNTKVDKKVEPKSSDKTHTGGGGSGGGGSGGGGSAAPPKAVLKLEPPWINVLQEDSVTLTCQGARSPESDSIQWFHNGNLIPTHTQPSYRFKANNNDSGEYTCQTGQTSLSDPVHLTVLSEWLVLQTPHLEFQEGETIMLRCHSWKDKPLVKVTFFQNGKSQKFSHLDPTFSIPQANHSHSGDYHCTGNIGYTLFSSKPVTITVQVPSMGSSSPMGIGGHHHHHH

SEQ ID NO: 385 - protein, 411 aa, synthetic construct
DIQMTQSPSSLSASVGDRVTITCSASSSVSYMNWYQQKPGKAPKRLIYDTSKLASGVPSRFSGSGSGTDFTLTISSLQPEDFATYYCQQWSSNPPTFGGGTKVEIKRTVAAPSVFIFPPSDEQLKSGTASVVCLLNNFYPREAKVQWKVDNALQSGNSQESVTEQDSKDSTYSLCSTLTLSKADYEKHKVYACEVTHQGLSSPVTKSFNRGESGGGGSGGGGSGGGGSAAPPKAVLKLEPPWINVLQEDSVTLTCQGARSPESDSIQWFHNGNLIPTHTQPSYRFKANNNDSGEYTCQTGQTSLSDPVHLTVLSEWLVLQTPHLEFQEGETIMLRCHSWKDKPLVKVTFFQNGKSQKFSHLDPTFSIPQANHSHSGDYHCTGNIGYTLFSSKPVTITVQVPSMGSSSPMGI

SEQ ID NO: 386 - protein, 433 aa, synthetic construct
EVQLVESGGGLVKPGGSLRLSCAASGFTFSSYGMFWVRQAPGKGLEWVATISRYSRYIYYPDSVKGRFTISRDNAKNSLYLQMNSLRAEDTAVYYCARRPLYGSSPDYWGQGTLVTVSSASTKGPSVFPLAPSSKSTSGGTAALGCLVKDYFPEPVTVSWNSGALTSGVHTCPAVLQSSGLYSLSSVVTVPSSSLGTQTYICNVNHKPSNTKVDKKVEPKSSDKTHTGGGGSGGGGSGGGGSAAPPKAVLKLEPPWINVLQEDSVTLTCQGARSPESDSIQWFHNGNLIPTHTQPSYRFKANNNDSGEYTCQTGQTSLSDPVHLTVLSEWLVLQTPHLEFQEGETIMLRCHSWKDKPLVKVTFFQNGKSQKFSHLDPTFSIPQANHSHSGDYHCTGNIGYTLFSSKPVTITVQVPSMGSSSPMGIGGHHHHHH

SEQ ID NO: 387 - protein, 411 aa, synthetic construct
EIVLTQSPATLSLSPGERATLSCSASSSVTYVHWYQQKPGQAPRLLIYDTSKLASGIPARFSGSGSGTDFTLTISSLEPEDFAVYYCFQGSGYPLTFGSGTKLEIKRTVAAPSVFIFPPSDEQLKSGTASVVCLLNNFYPREAKVQWKVDNALQSGNSQESVTEQDSKDSTYSLCSTLTLSKADYEKHKVYACEVTHQGLSSPVTKSFNRGESGGGGSGGGGSGGGGSAAPPKAVLKLEPPWINVLQEDSVTLTCQGARSPESDSIQWFHNGNLIPTHTQPSYRFKANNNDSGEYTCQTGQTSLSDPVHLTVLSEWLVLQTPHLEFQEGETIMLRCHSWKDKPLVKVTFFQNGKSQKFSHLDPTFSIPQANHSHSGDYHCTGNIGYTLFSSKPVTITVQVPSMGSSSPMGI

SEQ ID NO: 388 - protein, 433 aa, synthetic construct
EVQLLESGGGLVQPGGSLRLSCAASGFTFSSFPMAWVRQAPGKGLEWVSTISTSGGRTYYRDSVKGRFTISRDNSKNTLYLQMNSLRAEDTAVYYCAKFRQYSGGFDYWGQGTLVTVSSASTKGPSVFPLAPSSKSTSGGTAALGCLVKDYFPEPVTVSWNSGALTSGVHTCPAVLQSSGLYSLSSVVTVPSSSLGTQTYICNVNHKPSNTKVDKKVEPKSSDKTHTGGGGSGGGGSGGGGSAAPPKAVLKLEPPWINVLQEDSVTLTCQGARSPESDSIQWFHNGNLIPTHTQPSYRFKANNNDSGEYTCQTGQTSLSDPVHLTVLSEWLVLQTPHLEFQEGETIMLRCHSWKDKPLVKVTFFQNGKSQKFSHLDPTFSIPQANHSHSGDYHCTGNIGYTLFSSKPVTITVQVPSMGSSSPMGIGGHHHHHH

SEQ ID NO: 389 - protein, 414 aa, synthetic construct
DFMLTQPHSVSESPGKTVIISCTLSSGNIENNYVHWYQQRPGRAPTTVIFDDDKRPDGVPDRFSGSIDRSSNSASLTISGLQTEDEADYYCHSYVSSFNVFGGGTKLTVLSQPKAAPSVTLFPPSSEELQANKATLVCLVSDFYPGAVTVAWKADGSPVKVGVETTKPSKQSNNKYAACSYLSLTPEQWKSHRSYSCRVTHEGSTVEKTVAPAESSGGGGSGGGGSGGGGSAAPPKAVLKLEPPWINVLQEDSVTLTCQGARSPESDSIQWFHNGNLIPTHTQPSYRFKANNNDSGEYTCQTGQTSLSDPVHLTVLSEWLVLQTPHLEFQEGETIMLRCHSWKDKPLVKVTFFQNGKSQKFSHLDPTFSIPQANHSHSGDYHCTGNIGYTLFSSKPVTITVQVPSMGSSSPMGI

SEQ ID NO: 390 - protein, 437 aa, synthetic construct
QVQLQQSAAELARPGASVKMSCKASGYTFTRYTMQWVKQRPGQGLEWIGYINPSSGYIGYSQKFKDKTTLTADKSSSTAYMQLSSLTSEDSAVYYCARSKVYYDYDVYSMDYWGQGTSVTVSSASTKGPSVFPLAPSSKSTSGGTAALGCLVKDYFPEPVTVSWNSGALTSGVHTCPAVLQSSGLYSLSSVVTVPSSSLGTQTYICNVNHKPSNTKVDKKVEPKSSDKTHTGGGGSGGGGSGGGGSAAPPKAVLKLEPPWINVLQEDSVTLTCQGARSPESDSIQWFHNGNLIPTHTQPSYRFKANNNDSGEYTCQTGQTSLSDPVHLTVLSEWLVLQTPHLEFQEGETIMLRCHSWKDKPLVKVTFFQNGKSQKFSHLDPTFSIPQANHSHSGDYHCTGNIGYTLFSSKPVTITVQVPSMGSSSPMGIGGHHHHHH

SEQ ID NO: 391 - protein, 411 aa, synthetic construct
QIILTQSPAIMSASPGEKVTMTCSASSSVSYMHWYQQKSGTSPKRWIYDTSKLASGVPARFSGSGSGTSYSLTISSMEAEDAATYYCQQWSSNPLTFGAGTKLELKRTVAAPSVFIFPPSDEQLKSGTASVVCLLNNFYPREAKVQWKVDNALQSGNSQESVTEQDSKDSTYSLCSTLTLSKADYEKHKVYACEVTHQGLSSPVTKSFNRGESGGGGSGGGGSGGGGSAAPPKAVLKLEPPWINVLQEDSVTLTCQGARSPESDSIQWFHNGNLIPTHTQPSYRFKANNNDSGEYTCQTGQTSLSDPVHLTVLSEWLVLQTPHLEFQEGETIMLRCHSWKDKPLVKVTFFQNGKSQKFSHLDPTFSIPQANHSHSGDYHCTGNIGYTLFSSKPVTITVQVPSMGSSSPMGI

SEQ ID NO: 392 - protein, 437 aa, synthetic construct
EVQLVESGGGLVQPGGSLRLSCAASGFPLSSYAMIWVRQAPGKGLEWIGMILRAGNIYYASWVKGRFTISRDNSKNTVYLQMNSLRAEDTAVYYCARRHYNREGYPIGIGDLWGQGTLVTVSSASTKGPSVFPLAPSSKSTSGGTAALGCLVKDYFPEPVTVSWNSGALTSGVHTCPAVLQSSGLYSLSSVVTVPSSSLGTQTYICNVNHKPSNTKVDKKVEPKSSDKTHTGGGGSGGGGSGGGGSAAPPKAVLKLEPPWINVLQEDSVTLTCQGARSPESDSIQWFHNGNLIPTHTQPSYRFKANNNDSGEYTCQTGQTSLSDPVHLTVLSEWLVLQTPHLEFQEGETIMLRCHSWKDKPLVKVTFFQNGKSQKFSHLDPTFSIPQANHSHSGDYHCTGNIGYTLFSSKPVTITVQVPSMGSSSPMGIGGHHHHHH

SEQ ID NO: 393 - protein, 417 aa, synthetic construct
DIQMTQSPSSLSASVGDRVTITCQSSESVYNNKRLSWYQQKPGKAPKLLIYTASSLASGVPSRFSGSGSGTDFTLTISSLQPEDFATYYCQGEFTCSNADCFTFGQGTKLTVLSQPKAAPSVTLFPPSSEELQANKATLVCLVSDFYPGAVTVAWKADGSPVKVGVETTKPSKQSNNKYAACSYLSLTPEQWKSHRSYSCRVTHEGSTVEKTVAPAESSGGGGSGGGGSGGGGSAAPPKAVLKLEPPWINVLQEDSVTLTCQGARSPESDSIQWFHNGNLIPTHTQPSYRFKANNNDSGEYTCQTGQTSLSDPVHLTVLSEWLVLQTPHLEFQEGETIMLRCHSWKDKPLVKVTFFQNGKSQKFSHLDPTFSIPQANHSHSGDYHCTGNIGYTLFSSKPVTITVQVPSMGSSSPMGI

SEQ ID NO: 394 - protein, 434 aa, synthetic construct
QVQLVQSGAEVKKPGASVKVSCKASGYKFTSYVMHWVRQAPGQGLEWIGYINPYNDVTKYNEKFKGRVTITADKSTSTAYLQMNSLRSEDTAVHYCARGSYYDYDGFVYWGQGTLVTVSSASTKGPSVFPLAPSSKSTSGGTAALGCLVKDYFPEPVTVSWNSGALTSGVHTCPAVLQSSGLYSLSSVVTVPSSSLGTQTYICNVNHKPSNTKVDKKVEPKSSDKTHTGGGGSGGGGSGGGGSAAPPKAVLKLEPPWINVLQEDSVTLTCQGARSPESDSIQWFHNGNLIPTHTQPSYRFKANNNDSGEYTCQTGQTSLSDPVHLTVLSEWLVLQTPHLEFQEGETIMLRCHSWKDKPLVKVTFFQNGKSQKFSHLDPTFSIPQANHSHSGDYHCTGNIGYTLFSSKPVTITVQVPSMGSSSPMGIGGHHHHHH

SEQ ID NO: 395 - protein, 411 aa, synthetic construct
EIVLTQSPATLSLSPGERATLSCSATSSVSYMHWYQQKPGKAPKRWIYDTSKLASGVPSRFSGSGSGTEFTLTISSLQPEDFATYYCQQWSSNPLTFGQGTKLEIKRTVAAPSVFIFPPSDEQLKSGTASVVCLLNNFYPREAKVQWKVDNALQSGNSQESVTEQDSKDSTYSLCSTLTLSKADYEKHKVYACEVTHQGLSSPVTKSFNRGESGGGGSGGGGSGGGGSAAPPKAVLKLEPPWINVLQEDSVTLTCQGARSPESDSIQWFHNGNLIPTHTQPSYRFKANNNDSGEYTCQTGQTSLSDPVHLTVLSEWLVLQTPHLEFQEGETIMLRCHSWKDKPLVKVTFFQNGKSQKFSHLDPTFSIPQANHSHSGDYHCTGNIGYTLFSSKPVTITVQVPSMGSSSPMGI

SEQ ID NO: 396 - protein, 119 aa, synthetic construct
QVQLVQSGAEVKKPGASVKVSCKASGYTFTRYYMHWVRQAPGQGLEWMGYINPSRGYTNYAQKFQGRVTMTRDTSISTAYMELSSLRSEDTAVYYCARYYDDHYSLDYWGQGTLVTVSS

SEQ ID NO: 397 - protein, 106 aa, synthetic construct
DIQMTQSPSSLSASVGDRVTITCRASSSVSYMNWYQQKPGKAPKLLIYDTSKVASGVPSRFSGSGSGTDFTLTISSLQPEDFATYYCQQWSSNPLTFGGGTKVEIK

SEQ ID NO: 398 - protein, 528 aa, synthetic construct
AAPPKAVLKLEPPWINVLQEDSVTLTCQGARSPESDSIQWFHNGNLIPTHTQPSYRFKANNNDSGEYTCQTGQTSLSDPVHLTVLSEWLVLQTPHLEFQEGETIMLRCHSWKDKPLVKVTFFQNGKSQKFSHLDPTFSIPQANHSHSGDYHCTGNIGYTLFSSKPVTITVQVPSMGSSSPMGIGGGGSGGGGSGGGGSASTKGPSVFPLAPSSKSTSGGTAALGCLVKDYFPEPVTVSWNSGALTSGVHTCPAVLQSSGLYSLSSVVTVPSSSLGTQTYICNVNHKPSNTKVDKKVEPKSSDKTHTCPPCPAPEAAGGPSVFLFPPKPKDTLMISRTPEVTCVVVDVSHEDPEVKFNWYVDGVEVHNAKTKPREEQYNSTYRVVSVLTVLHQDWLNGKEYKCKVSNKALAAPIEKTISKAKGQPREPQVYTLPPSRDELTKNQVSLSCAVKGFYPSDIAVEWESNGQPENNYKTTPPVLDSDGSFFLVSKLTVDKSRWQQGNVFSCSVMHEALHNHYTQKSLSLSPGK

SEQ ID NO: 399 - protein, 305 aa, synthetic construct
AAPPKAVLKLEPPWINVLQEDSVTLTCQGARSPESDSIQWFHNGNLIPTHTQPSYRFKANNNDSGEYTCQTGQTSLSDPVHLTVLSEWLVLQTPHLEFQEGETIMLRCHSWKDKPLVKVTFFQNGKSQKFSHLDPTFSIPQANHSHSGDYHCTGNIGYTLFSSKPVTITVQVPSMGSSSPMGIGGGGSGGGGSGGGGSRTVAAPSVFIFPPSDEQLKSGTASVVCLLNNFYPREAKVQWKVDNALQSGNSQESVTEQDSKDSTYSLCSTLTLSKADYEKHKVYACEVTHQGLSSPVTKSFNRGES

SEQ ID NO: 400 - protein, 455 aa, synthetic construct
EVQLVESGGGLVQPGGSLKLSCAASGFTFNKYAMNWVRQAPGKGLEWVARIRSKYNNYATYYADSVKDRFTISRDDSKNTAYLQMNNLKTEDTAVYYCVRHGNFGNSYISYWAYWGQGTLVTVSSASTKGPSVFPLAPSSKSTSGGTAALGCLVKDYFPEPVTVSWNSGALTSGVHTFPAVLQSSGLYSLSSVVTVPSSSLGTQTYICNVNHKPSNTKVDKKVEPKSSDKTHTCPPCPAPEAAGGPSVFLFPPKPKDTLMISRTPEVTCVVVDVSHEDPEVKFNWYVDGVEVHNAKTKPREEQYNSTYRVVSVLTVLHQDWLNGKEYKCKVSNKALAAPIEKTISKAKGQPREPQVYTLPPSRDELTKNQVSLWCLVKGFYPSDIAVEWESNGQPENNYKTTPPVLDSDGSFFLYSKLTVDKSRWQQGNVFSCSVMHEALHNHYTQKSLSLSPGK

SEQ ID NO: 401 - protein, 215 aa, synthetic construct
QTVVTQEPSLTVSPGGTVTLTCGSSTGAVTSGNYPNWVQQKPGQAPRGLIGGTKFLAPGTPARFSGSLLGGKAALTLSGVQPEDEAEYYCVLWYSNRWVFGGGTKLTVLSQPKAAPSVTLFPPSSEELQANKATLVCLVSDFYPGAVTVAWKADGSPVKVGVETTKPSKQSNNKYAASSYLSLTPEQWKSHRSYSCRVTHEGSTVEKTVAPAESS

SEQ ID NO: 402 - protein, 452 aa, synthetic construct
EVQLVESGGGLVQPGGSLRLSCAASGYSFTGYTMNWVRQAPGKGLEWVALINPTKGVSTYNQKFKDRFTISVDKSKNTAYLQMNSLRAEDTAVYYCARSGYYGDSDWYFDVWGQGTLVTVSSASTKGPSVFPLAPSSKSTSGGTAALGCLVKDYFPEPVTVSWNSGALTSGVHTFPAVLQSSGLYSLSSVVTVPSSSLGTQTYICNVNHKPSNTKVDKKVEPKSSDKTHTCPPCPAPEAAGGPSVFLFPPKPKDTLMISRTPEVTCVVVDVSHEDPEVKFNWYVDGVEVHNAKTKPREEQYNSTYRVVSVLTVLHQDWLNGKEYKCKVSNKALAAPIEKTISKAKGQPREPQVYTLPPSRDELTKNQVSLWCLVKGFYPSDIAVEWESNGQPENNYKTTPPVLDSDGSFFLYSKLTVDKSRWQQGNVFSCSVMHEALHNHYTQKSLSLSPGK

SEQ ID NO: 403 - protein, 214 aa, synthetic construct
DIQMTQSPSSLSASVGDRVTITCRASQDIRNYLNWYQQKPGKAPKLLIYYTSRLESGVPSRFSGSGSGTDYTLTISSLQPEDFATYYCQQGNTLPWTFGQGTKVEIKRTVAAPSVFIFPPSDEQLKSGTASVVCLLNNFYPREAKVQWKVDNALQSGNSQESVTEQDSKDSTYSLSSTLTLSKADYEKHKVYACEVTHQGLSSPVTKSFNRGES

SEQ ID NO: 404 - protein, 430 aa, synthetic construct
AAPPKAVLKLEPPWINVLQEDSVTLTCQGARSPESDSIQWFHNGNLIPTHTQPSYRFKANNNDSGEYTCQTGQTSLSDPVHLTVLSEWLVLQTPHLEFQEGETIMLRCHSWKDKPLVKVTFFQNGKSQKFSHLDPTFSIPQANHSHSGDYHCTGNIGYTLFSSKPVTITVQVPSMGSSSPMGIGGGGSGGGGSGGGGSEPKSSDKTHTCPPCPAPEAAGGPSVFLFPPKPKDTLMISRTPEVTCVVVDVSHEDPEVKFNWYVDGVEVHNAKTKPREEQYNSTYRVVSVLTVLHQDWLNGKEYKCKVSNKALAAPIEKTISKAKGQPREPQVYTLPPSRDELTKNQVSLSCAVKGFYPSDIAVEWESNGQPENNYKTTPPVLDSDGSFFLVSKLTVDKSRWQQGNVFSCSVMHEALHNHYTQKSLSLSPGK

SEQ ID NO: 405 - protein, 628 aa, synthetic construct
AAPPKAVLKLEPPWINVLQEDSVTLTCQGARSPESDSIQWFHNGNLIPTHTQPSYRFKANNNDSGEYTCQTGQTSLSDPVHLTVLSEWLVLQTPHLEFQEGETIMLRCHSWKDKPLVKVTFFQNGKSQKFSHLDPTFSIPQANHSHSGDYHCTGNIGYTLFSSKPVTITVQVPSMGSSSPMGIGGGGSGGGGSGGGGSAAPPKAVLKLEPPWINVLQEDSVTLTCQGARSPESDSIQWFHNGNLIPTHTQPSYRFKANNNDSGEYTCQTGQTSLSDPVHLTVLSEWLVLQTPHLEFQEGETIMLRCHSWKDKPLVKVTFFQNGKSQKFSHLDPTFSIPQANHSHSGDYHCTGNIGYTLFSSKPVTITVQVPSMGSSSPMGIGGGGSGGGGSGGGGSEPKSSDKTHTCPPCPAPEAAGGPSVFLFPPKPKDTLMISRTPEVTCVVVDVSHEDPEVKFNWYVDGVEVHNAKTKPREEQYNSTYRVVSVLTVLHQDWLNGKEYKCKVSNKALAAPIEKTISKAKGQPREPQVYTLPPSRDELTKNQVSLSCAVKGFYPSDIAVEWESNGQPENNYKTTPPVLDSDGSFFLVSKLTVDKSRWQQGNVFSCSVMHEALHNHYTQKSLSLSPGK

SEQ ID NO: 406 - protein, 232 aa, synthetic construct
EPKSSDKTHTCPPCPAPEAAGGPSVFLFPPKPKDTLMISRTPEVTCVVVDVSHEDPEVKFNWYVDGVEVHNAKTKPREEQYNSTYRVVSVLTVLHQDWLNGKEYKCKVSNKALAAPIEKTISKAKGQPREPQVYTLPPSRDELTKNQVSLWCLVKGFYPSDIAVEWESNGQPENNYKTTPPVLDSDGSFFLYSKLTVDKSRWQQGNVFSCSVMHEALHNHYTQKSLSLSPGK

SEQ ID NO: 407 - protein, 491 aa, synthetic construct
DIQMTQSPSSLSASVGDRVTITCRASQDIRNYLNWYQQKPGKAPKLLIYYTSRLESGVPSRFSGSGSGTDYTLTISSLQPEDFATYYCQQGNTLPWTFGQGTKVEIKGGGGSGGGGSGGGGSEVQLVESGGGLVQPGGSLRLSCAASGYSFTGYTMNWVRQAPGKGLEWVALINPTKGVSTYNQKFKDRFTISVDKSKNTAYLQMNSLRAEDTAVYYCARSGYYGDSDWYFDVWGQGTLVTVSSGGGGSGGGGSGGGGSEPKSSDKTHTCPPCPAPEAAGGPSVFLFPPKPKDTLMISRTPEVTCVVVDVSHEDPEVKFNWYVDGVEVHNAKTKPREEQYNSTYRVVSVLTVLHQDWLNGKEYKCKVSNKALAAPIEKTISKAKGQPREPQVYTLPPSRDELTKNQVSLWCLVKGFYPSDIAVEWESNGQPENNYKTTPPVLDSDGSFFLYSKLTVDKSRWQQGNVFSCSVMHEALHNHYTQKSLSLSPGK

SEQ ID NO: 408 - protein, 501 aa, synthetic construct
EVQLVESGGGLVQPGGSLKLSCAASGFTFNKYAMNWVRQAPGKGLEWVARIRSKYNNYATYYADSVKDRFTISRDDSKNTAYLQMNNLKTEDTAVYYCVRHGNFGNSYISYWAYWGQGTLVTVSSGGGGSGGGGSGGGGSGGGGSQTVVTQEPSLTVSPGGTVTLTCGSSTGAVTSGNYPNWVQQKPGQAPRGLIGGTKFLAPGTPARFSGSLLGGKAALTLSGVQPEDEAEYYCVLWYSNRWVFGGGTKLTVLGGGGSGGGGSGGGGSEPKSSDKTHTCPPCPAPEAAGGPSVFLFPPKPKDTLMISRTPEVTCVVVDVSHEDPEVKFNWYVDGVEVHNAKTKPREEQYNSTYRVVSVLTVLHQDWLNGKEYKCKVSNKALAAPIEKTISKAKGQPREPQVYTLPPSRDELTKNQVSLWCLVKGFYPSDIAVEWESNGQPENNYKTTPPVLDSDGSFFLYSKLTVDKSRWQQGNVFSCSVMHEALHNHYTQKSLSLSPGK

SEQ ID NO: 409 - protein, 786 aa, synthetic construct
AAPPKAVLKLEPPWINVLQEDSVTLTCQGARSPESDSIQWFHNGNLIPTHTQPSYRFKANNNDSGEYTCQTGQTSLSDPVHLTVLSEWLVLQTPHLEFQEGETIMLRCHSWKDKPLVKVTFFQNGKSQKFSHLDPTFSIPQANHSHSGDYHCTGNIGYTLFSSKPVTITVQVPSMGSSSPMGIGGGGSGGGGSGGGGEVQLVESGGGLVQPGGSLKLSCAASGFTFNKYAMNWVRQAPGKGLEWVARIRSKYNNYATYYADSVKDRFTISRDDSKNTAYLQMNNLKTEDTAVYYCVRHGNFGNSYISYWAYWGQGTLVTVSSGGGGSGGGGSGGGGSGGGGSQTVVTQEPSLTVSPGGTVTLTCGSSTGAVTSGNYPNWVQQKPGQAPRGLIGGTKFLAPGTPARFSGSLLGGKAALTLSGVQPEDEAEYYCVLWYSNRWVFGGGTKLTVLGGGGSGGGGSGGGGAAPPKAVLKLEPPWINVLQEDSVTLTCQGARSPESDSIQWFHNGNLIPTHTQPSYRFKANNNDSGEYTCQTGQTSLSDPVHLTVLSEWLVLQTPHLEFQEGETIMLRCHSWKDKPLVKVTFFQNGKSQKFSHLDPTFSIPQANHSHSGDYHCTGNIGYTLFSSKPVTITVQVPSMGSSSPMGIGGGGSGGGGSGGGGSEVQLVESGGGLVQPGNSLRLSCAASGFTFSSFGMSWVRQAPGKGLEWVSSISGSGSDTLYADSVKGRFTISRDNAKTTLYLQMNSLRPEDTAVYYCTIGGSLSRSSQGTLVTVSSGGHHHHHH

SEQ ID NO: 410 - protein, 776 aa, synthetic construct
AAPPKAVLKLEPPWINVLQEDSVTLTCQGARSPESDSIQWFHNGNLIPTHTQPSYRFKANNNDSGEYTCQTGQTSLSDPVHLTVLSEWLVLQTPHLEFQEGETIMLRCHSWKDKPLVKVTFFQNGKSQKFSHLDPTFSIPQANHSHSGDYHCTGNIGYTLFSSKPVTITVQVPSMGSSSPMGIGGGGSGGGGSGGGGDIQMTQSPSSLSASVGDRVTITCRASQDIRNYLNWYQQKPGKAPKLLIYYTSRLESGVPSRFSGSGSGTDYTLTISSLQPEDFATYYCQQGNTLPWTFGQGTKVEIKGGGGSGGGGSGGGGSEVQLVESGGGLVQPGGSLRLSCAASGYSFTGYTMNWVRQAPGKGLEWVALINPTKGVSTYNQKFKDRFTISVDKSKNTAYLQMNSLRAEDTAVYYCARSGYYGDSDWYFDVWGQGTLVTVSSGGGGSGGGGSGGGGAAPPKAVLKLEPPWINVLQEDSVTLTCQGARSPESDSIQWFHNGNLIPTHTQPSYRFKANNNDSGEYTCQTGQTSLSDPVHLTVLSEWLVLQTPHLEFQEGETIMLRCHSWKDKPLVKVTFFQNGKSQKFSHLDPTFSIPQANHSHSGDYHCTGNIGYTLFSSKPVTITVQVPSMGSSSPMGIGGGGSGGGGSGGGGSEVQLVESGGGLVQPGNSLRLSCAASGFTFSSFGMSWVRQAPGKGLEWVSSISGSGSDTLYADSVKGRFTISRDNAKTTLYLQMNSLRPEDTAVYYCTIGGSLSRSSQGTLVTVSSGGHHHHHH

SEQ ID NO: 411 - protein, 493 aa, synthetic construct
QVQLVQSGAEVKKPGASVKVSCKASGYTFTNYWINWVRQAPGQGLEWMGDIYPGGGITNYAQKFQGRVTMTRDTSISTAYMELSSLRSEDTAVYYCARSYGKYFDYWGQGTLVTVSSASTKGPSVFPLAPQVQLVQSGAEVKKPGASVKVSCKASGYTFTNYWINWVRQAPGQGLEWMGDIYPGGGITNYAQKFQGRVTMTRDTSISTAYMELSSLRSEDTAVYYCARSYGKYFDYWGQGTLVTVSSASTKGPSVFPLAPSSKSTSGGTAALGCLVKDYFPEPVTVSWNSGALTSGVHTCPAVLQSSGLYSLSSVVTVPSSSLGTQTYICNVNHKPSNTKVDKKVEPKSSDKTHTGGGGSGGGGSGGGGSEVQLVESGGGLVQPGNSLRLSCAASGFTFSSFGMSWVRQAPGKGLEWVSSISGSGSDTLYADSVKGRFTISRDNAKTTLYLQMNSLRPEDTAVYYCTIGGSLSRSSQGTLVTVSSGGHHHHHH

SEQ ID NO: 412 - protein, 593 aa, synthetic construct
DIQMTQSPSSLSASVGDRVTITCKASQDIKSYLTWYQQKPGKAPKLLIYYSTRLADGVPSRFSGSGSGTDFTLTISSLQPEDFATYYCLQHDESPFTFGGGTKVEIKRTVAAPSVFIFPPDIQMTQSPSSLSASVGDRVTITCKASQDIKSYLTWYQQKPGKAPKLLIYYSTRLADGVPSRFSGSGSGTDFTLTISSLQPEDFATYYCLQHDESPFTFGGGTKVEIKRTVAAPSVFIFPPSDEQLKSGTASVVCLLNNFYPREAKVQWKVDNALQSGNSQESVTEQDSKDSTYSLCSTLTLSKADYEKHKVYACEVTHQGLSSPVTKSFNRGESGGGGSGGGGSGGGGSDIQMTQSPSSLSASVGDRVTITCRASQDIRNYLNWYQQKPGKAPKLLIYYTSRLESGVPSRFSGSGSGTDYTLTISSLQPEDFATYYCQQGNTLPWTFGQGTKVEIKGGGGSGGGGSGGGGSEVQLVESGGGLVQPGGSLRLSCAASGYSFTGYTMNWVRQAPGKGLEWVALINPTKGVSTYNQKFKDRFTISVDKSKNTAYLQMNSLRAEDTAVYYCARSGYYGDSDWYFDVWGQGTLVTVSS

SEQ ID NO: 413 - protein, 603 aa, synthetic construct
DIQMTQSPSSLSASVGDRVTITCKASQDIKSYLTWYQQKPGKAPKLLIYYSTRLADGVPSRFSGSGSGTDFTLTISSLQPEDFATYYCLQHDESPFTFGGGTKVEIKRTVAAPSVFIFPPDIQMTQSPSSLSASVGDRVTITCKASQDIKSYLTWYQQKPGKAPKLLIYYSTRLADGVPSRFSGSGSGTDFTLTISSLQPEDFATYYCLQHDESPFTFGGGTKVEIKRTVAAPSVFIFPPSDEQLKSGTASVVCLLNNFYPREAKVQWKVDNALQSGNSQESVTEQDSKDSTYSLCSTLTLSKADYEKHKVYACEVTHQGLSSPVTKSFNRGESGGGGSGGGGSGGGGSEVQLVESGGGLVQPGGSLKLSCAASGFTFNKYAMNWVRQAPGKGLEWVARIRSKYNNYATYYADSVKDRFTISRDDSKNTAYLQMNNLKTEDTAVYYCVRHGNFGNSYISYWAYWGQGTLVTVSSGGGGSGGGGSGGGGSGGGGSQTVVTQEPSLTVSPGGTVTLTCGSSTGAVTSGNYPNWVQQKPGQAPRGLIGGTKFLAPGTPARFSGSLLGGKAALTLSGVQPEDEAEYYCVLWYSNRWVFGGGTKLTVL

SEQ ID NO: 414 - protein, 334 aa, synthetic construct
DIQMTQSPSSLSASVGDRVTITCKASQDIKSYLTWYQQKPGKAPKLLIYYSTRLADGVPSRFSGSGSGTDFTLTISSLQPEDFATYYCLQHDESPFTFGGGTKVEIKRTVAAPSVFIFPPDIQMTQSPSSLSASVGDRVTITCKASQDIKSYLTWYQQKPGKAPKLLIYYSTRLADGVPSRFSGSGSGTDFTLTISSLQPEDFATYYCLQHDESPFTFGGGTKVEIKRTVAAPSVFIFPPSDEQLKSGTASVVCLLNNFYPREAKVQWKVDNALQSGNSQESVTEQDSKDSTYSLCSTLTLSKADYEKHKVYACEVTHQGLSSPVTKSFNRGES

SEQ ID NO: 415 - protein, 577 aa, synthetic construct
QVQLVQSGAEVKKPGASVKVSCKASGYTFTNYWINWVRQAPGQGLEWMGDIYPGGGITNYAQKFQGRVTMTRDTSISTAYMELSSLRSEDTAVYYCARSYGKYFDYWGQGTLVTVSSASTKGPSVFPLAPQVQLVQSGAEVKKPGASVKVSCKASGYTFTNYWINWVRQAPGQGLEWMGDIYPGGGITNYAQKFQGRVTMTRDTSISTAYMELSSLRSEDTAVYYCARSYGKYFDYWGQGTLVTVSSASTKGPSVFPLAPSSKSTSGGTAALGCLVKDYFPEPVTVSWNSGALTSGVHTCPAVLQSSGLYSLSSVVTVPSSSLGTQTYICNVNHKPSNTKVDKKVEPKSSDKTHTCPPCPAPEAAGGPSVFLFPPKPKDTLMISRTPEVTCVVVDVSHEDPEVKFKWYVDGVEVHNAKTKPREEQYNSTYRVVSVLTVVHQDWLNGKEYKCKVSNKALAAPIEKTISKAKGQPREPQVYTLPPSRDELTKNQVSLWCLVKGFYPSDIAVEWESNGQPENNYKTTPPVLDSDGSFFLYSKLTVDKSRWQQGNVFSCSVMHEALHNHYTQKSLSLSPGK

SEQ ID NO: 416 - protein, 455 aa, synthetic construct
EVQLVESGGGLVQPGGSLKLSCAASGFTFNKYAMNWVRQAPGKGLEWVARIRSKYNNYATYYADSVKDRFTISRDDSKNTAYLQMNNLKTEDTAVYYCVRHGNFGNSYISYWAYWGQGTLVTVSSASTKGPSVFPLAPSSKSTSGGTAALGCLVKDYFPEPVTVSWNSGALTSGVHTFPAVLQSSGLYSLSSVVTVPSSSLGTQTYICNVNHKPSNTKVDKKVEPKSSDKTHTCPPCPAPEAAGGPSVFLFPPKPKDTLMISRTPEVTCVVVDVSHEDPEVKFKWYVDGVEVHNAKTKPREEQYNSTYRVVSVLTVVHQDWLNGKEYKCKVSNKALAAPIEKTISKAKGQPREPQVYTLPPSRDELTKNQVSLSCAVKGFYPSDIAVEWESNGQPENNYKTTPPVLDSDGSFFLVSKLTVDKSRWQQGNVFSCSVMHEALHNHYTQKSLSLSPGK

SEQ ID NO: 417 - protein, 495 aa, synthetic construct
EVQLVESGGGLVQPGGSLKLSCAASGFTFNKYAMNWVRQAPGKGLEWVARIRSKYNNYATYYADSVKDRFTISRDDSKNTAYLQMNNLKTEDTAVYYCVRHGNFGNSYISYWAYWGQGTLVTVSSASTKGPSVFPLAPSSKSTSGGTAALGCLVKDYFPEPVTVSWNSGALTSGVHTFPAVLQSSGLYSLSSVVTVPSSSLGTQTYICNVNHKPSNTKVDKKVEPKSSDKTHTGGGGSGGGGSGGGGSDIQMTQSPSSLSASVGDRVTITCKASQDIKSYLTWYQQKPGKAPKLLIYYSTRLADGVPSRFSGSGSGTDFTLTISSLQPEDFATYYCLQHDESPFTFGGGTKVEIKGGGGSGGGGSGGGGSQVQLVQSGAEVKKPGASVKVSCKASGYTFTNYWINWVRQAPGQGLEWMGDIYPGGGITNYAQKFQGRVTMTRDTSISTAYMELSSLRSEDTAVYYCARSYGKYFDYWGQGTLVTVSSGGHHHHHH

SEQ ID NO: 418 - protein, 469 aa, synthetic construct
QTVVTQEPSLTVSPGGTVTLTCGSSTGAVTSGNYPNWVQQKPGQAPRGLIGGTKFLAPGTPARFSGSLLGGKAALTLSGVQPEDEAEYYCVLWYSNRWVFGGGTKLTVLSQPKAAPSVTLFPPSSEELQANKATLVCLVSDFYPGAVTVAWKADGSPVKVGVETTKPSKQSNNKYAASSYLSLTPEQWKSHRSYSCRVTHEGSTVEKTVAPAESSGGGGSGGGGSGGGGSDIQMTQSPSSLSASVGDRVTITCKASQDIKSYLTWYQQKPGKAPKLLIYYSTRLADGVPSRFSGSGSGTDFTLTISSLQPEDFATYYCLQHDESPFTFGGGTKVEIKGGGGSGGGGSGGGGSQVQLVQSGAEVKKPGASVKVSCKASGYTFTNYWINWVRQAPGQGLEWMGDIYPGGGITNYAQKFQGRVTMTRDTSISTAYMELSSLRSEDTAVYYCARSYGKYFDYWGQGTLVTVSS

SEQ ID NO: 419 - protein, 499 aa, synthetic construct
QVQLVQSGAEVKKPGASVKVSCKASGFNIKDTYIYWVRQAPGQGLEWMGRIDPANGDTNYAQKFQGRVTMTRDTSISTAYMELSSLRSEDTAVYYCARKYGNNRAWFAFWGQGTLVTVSSASTKGPSVFPLASQVQLVQSGAEVKKPGASVKVSCKASGFNIKDTYIYWVRQAPGQGLEWMGRIDPANGDTNYAQKFQGRVTMTRDTSISTAYMELSSLRSEDTAVYYCARKYGNNRAWFAFWGQGTLVTVSSASTKGPSVFPLASSSKSTSGGTAALGCLVKDYFPEPVTVSWNSGALTSGVHTCPAVLQSSGLYSLSSVVTVPSSSLGTQTYICNVNHEPSNTKVDKKVEPKSSDKTHTGGGGSGGGGSGGGGSEVQLVESGGGLVQPGNSLRLSCAASGFTFSSFGMSWVRQAPGKGLEWVSSISGSGSDTLYADSVKGRFTISRDNAKTTLYLQMNSLRPEDTAVYYCTIGGSLSRSSQGTLVTVSSGGHHHHHH

SEQ ID NO: 420 - protein, 603 aa, synthetic construct
DIVMTQSPDSLAVSLGERATINCKASQSVSDDVAWYQQKPGQPPKLLIYFASYRYTGVPDRFSGSGSGTDFTLTISSLQAEDVAVYYCQQDYSSPLTFGQGTKVEIKRTVAAPSVFIFPPDIVMTQSPDSLAVSLGERATINCKASQSVSDDVAWYQQKPGQPPKLLIYFASYRYTGVPDRFSGSGSGTDFTLTISSLQAEDVAVYYCQQDYSSPLTFGQGTKVEIKRTVAAPSVFIFPPSDEQLKSGTASVVCLLNNFYPREAKVQWKVDNALQSGNSQESVTEQDSKDSTYSLCSTLTLSKADYEKHKVYACEVTHQGLSSPVTKSFNRGESGGGGSGGGGSGGGGSEVQLVESGGGLVQPGGSLKLSCAASGFTFNKYAMNWVRQAPGKGLEWVARIRSKYNNYATYYADSVKDRFTISRDDSKNTAYLQMNNLKTEDTAVYYCVRHGNFGNSYISYWAYWGQGTLVTVSSGGGGSGGGGSGGGGSGGGGSQTVVTQEPSLTVSPGGTVTLTCGSSTGAVTSGNYPNWVQQKPGQAPRGLIGGTKFLAPGTPARFSGSLLGGKAALTLSGVQPEDEAEYYCVLWYSNRWVFGGGTKLTVL

SEQ ID NO: 421 - protein, 120 aa, synthetic construct
QVQLVQSGAEVKKPGASVKVSCKASGFNIKDTYIYWVRQAPGQGLEWMGRIDPANGDTNYAQKFQGRVTMTRDTSISTAYMELSSLRSEDTAVYYCARKYGNNRAWFAFWGQGTLVTVSS

SEQ ID NO: 422 - protein, 107 aa, synthetic construct
DIVMTQSPDSLAVSLGERATINCKASQSVSDDVAWYQQKPGQPPKLLIYFASYRYTGVPDRFSGSGSGTDFTLTISSLQAEDVAVYYCQQDYSSPLTFGQGTKVEIK

SEQ ID NO: 423 - protein, 334 aa, synthetic construct
DIVMTQSPDSLAVSLGERATINCKASQSVSDDVAWYQQKPGQPPKLLIYFASYRYTGVPDRFSGSGSGTDFTLTISSLQAEDVAVYYCQQDYSSPLTFGQGTKVEIKRTVAAPSVFIFPPDIVMTQSPDSLAVSLGERATINCKASQSVSDDVAWYQQKPGQPPKLLIYFASYRYTGVPDRFSGSGSGTDFTLTISSLQAEDVAVYYCQQDYSSPLTFGQGTKVEIKRTVAAPSVFIFPPSDEQLKSGTASVVCLLNNFYPREAKVQWKVDNALQSGNSQESVTEQDSKDSTYSLCSTLTLSKADYEKHKVYACEVTHQGLSSPVTKSFNRGES

SEQ ID NO: 424 - protein, 583 aa, synthetic construct
QVQLVQSGAEVKKPGASVKVSCKASGFNIKDTYIYWVRQAPGQGLEWMGRIDPANGDTNYAQKFQGRVTMTRDTSISTAYMELSSLRSEDTAVYYCARKYGNNRAWFAFWGQGTLVTVSSASTKGPSVFPLASQVQLVQSGAEVKKPGASVKVSCKASGFNIKDTYIYWVRQAPGQGLEWMGRIDPANGDTNYAQKFQGRVTMTRDTSISTAYMELSSLRSEDTAVYYCARKYGNNRAWFAFWGQGTLVTVSSASTKGPSVFPLASSSKSTSGGTAALGCLVKDYFPEPVTVSWNSGALTSGVHTCPAVLQSSGLYSLSSVVTVPSSSLGTQTYICNVNHEPSNTKVDKKVEPKSSDKTHTCPPCPAPEAAGGPSVFLFPPKPKDTLMISRTPEVTCVVVDVSHEDPEVKFNWYVDGVEVHNAKTKPREEQYNSTYRVVSVLTVLHQDWLNGKEYKCKVSNKALAAPIEKTISKAKGQPREPQVYTLPPSRDELTKNQVSLSCAVKGFYPSDIAVEWESNGQPENNYKTTPPVLDSDGSFFLVSKLTVDKSRWQQGNVFSCSVMHEALHNHYTQKSLSLSPGK

SEQ ID NO: 425 - protein, 455 aa, synthetic construct
EVQLVESGGGLVQPGGSLKLSCAASGFTFNKYAMNWVRQAPGKGLEWVARIRSKYNNYATYYADSVKDRFTISRDDSKNTAYLQMNNLKTEDTAVYYCVRHGNFGNSYISYWAYWGQGTLVTVSSASTKGPSVFPLASSSKSTSGGTAALGCLVKDYFPEPVTVSWNSGALTSGVHTFPAVLQSSGLYSLSSVVTVPSSSLGTQTYICNVNHEPSNTKVDKKVEPKSSDKTHTCPPCPAPEAAGGPSVFLFPPKPKDTLMISRTPEVTCVVVDVSHEDPEVKFNWYVDGVEVHNAKTKPREEQYNSTYRVVSVLTVLHQDWLNGKEYKCKVSNKALAAPIEKTISKAKGQPREPQVYTLPPSRDELTKNQVSLWCLVKGFYPSDIAVEWESNGQPENNYKTTPPVLDSDGSFFLYSKLTVDKSRWQQGNVFSCSVMHEALHNHYTQKSLSLSPGK

SEQ ID NO: 426 - protein, 589 aa, synthetic construct
DIVMTQSPDSLAVSLGERATINCKASQSVSDDVAWYQQKPGQPPKLLIYFASYRYTGVPDRFSGSGSGTDFTLTISSLQAEDVAVYYCQQDYSSPLTFGQGTKVEIKRTVAAPSVFIFPPDIVMTQSPDSLAVSLGERATINCKASQSVSDDVAWYQQKPGQPPKLLIYFASYRYTGVPDRFSGSGSGTDFTLTISSLQAEDVAVYYCQQDYSSPLTFGQGTKVEIKRTVAAPSVFIFPPSDEQLKSGTASVVCLLNNFYPREAKVQWKVDNALQSGNSQESVTEQDSKDSTYSLCSTLTLSKADYEKHKVYACEVTHQGLSSPVTKSFNRGESGGGGSGGGGSGGGGSQVQLQQSGAELARPGASVKMSCKTSGYTFTRYTMHWVKQRPGQGLEWIGYINPSRGYTNYNQKFKDKATLTTDKSSSTAYMQLSSLTSEDSAVYYCARYYDDHYSLDYWGQGTTLTVSSGGGGSGGGGSGGGGSQIVLTQSPSSLSASLGEKVTMTCRASSSVSYMNWYQQKPGTSPKRWIYDTSKVASGVPDRFSGSGSGTSYSLTISSMEAEDAATYYCQQWSSNPLTFGAGTKLELK

SEQ ID NO: 427 - protein, 435 aa, synthetic construct
QVQLQESGPGLVKPSETLSLTCTVSGFSLTGYGVNWIRQPPGKGLEWIGMIWGDGSTNYNPSLKSRVTISVDTSKNQFSLKLSSVTAADTAVYYCARDGYSNFHYYVMDYWGQGTLVTVSSASTKGPSVFPLAPSSKSTSGGTAALGCLVKDYFPEPVTVSWNSGALTSGVHTCPAVLQSSGLYSLSSVVTVPSSSLGTQTYICNVNHKPSNTKVDKKVEPKSSDKTHTGGGGSGGGGSGGGGSAAPPKAVLKLEPPWINVLQEDSVTLTCQGARSPESDSIQWFHNGNLIPTHTQPSYRFKANNNDSGEYTCQTGQTSLSDPVHLTVLSEWLVLQTPHLEFQEGETIMLRCHSWKDKPLVKVTFFQNGKSQKFSHLDPTFSIPQANHSHSGDYHCTGNIGYTLFSSKPVTITVQVPSMGSSSPMGIGGHHHHHH

SEQ ID NO: 428 - protein, 416 aa, synthetic construct
DIVMTQSPDSLAVSLGERATINCRASESVEYYVTSLMQWYQQKPGQPPKLLIYAASNVESGVPDRFSGSGSGTDFTLTISSLQAEDVAVYYCQQSRKVPWTFGQGTKVEIKRTVAAPSVFIFPPSDEQLKSGTASVVCLLNNFYPREAKVQWKVDNALQSGNSQESVTEQDSKDSTYSLCSTLTLSKADYEKHKVYACEVTHQGLSSPVTKSFNRGESGGGGSGGGGSGGGGSAAPPKAVLKLEPPWINVLQEDSVTLTCQGARSPESDSIQWFHNGNLIPTHTQPSYRFKANNNDSGEYTCQTGQTSLSDPVHLTVLSEWLVLQTPHLEFQEGETIMLRCHSWKDKPLVKVTFFQNGKSQKFSHLDPTFSIPQANHSHSGDYHCTGNIGYTLFSSKPVTITVQVPSMGSSSPMGI

SEQ ID NO: 429 - protein, 434 aa, synthetic construct
QVQLQESGPGLVKPSETLSLTCTVSGFSLSDYGVHWIRQPPGKGLEWIGVIWAGGGTNYNPSLKSRVTISVDTSKNQFSLKLSSVTAADTAVYYCARDKGYSYYYSMDYWGQGTLVTVSSASTKGPSVFPLAPSSKSTSGGTAALGCLVKDYFPEPVTVSWNSGALTSGVHTCPAVLQSSGLYSLSSVVTVPSSSLGTQTYICNVNHKPSNTKVDKKVEPKSSDKTHTGGGGSGGGGSGGGGSAAPPKAVLKLEPPWINVLQEDSVTLTCQGARSPESDSIQWFHNGNLIPTHTQPSYRFKANNNDSGEYTCQTGQTSLSDPVHLTVLSEWLVLQTPHLEFQEGETIMLRCHSWKDKPLVKVTFFQNGKSQKFSHLDPTFSIPQANHSHSGDYHCTGNIGYTLFSSKPVTITVQVPSMGSSSPMGIGGHHHHHH

SEQ ID NO: 430 - protein, 416 aa, synthetic construct
DIVMTQSPDSLAVSLGERATINCRASESVEYYVTSLMQWYQQKPGQPPKLLIYAASNVESGVPDRFSGSGSGTDFTLTISSLQAEDVAVYYCQQSRKVPYTFGQGTKVEIKRTVAAPSVFIFPPSDEQLKSGTASVVCLLNNFYPREAKVQWKVDNALQSGNSQESVTEQDSKDSTYSLCSTLTLSKADYEKHKVYACEVTHQGLSSPVTKSFNRGESGGGGSGGGGSGGGGSAAPPKAVLKLEPPWINVLQEDSVTLTCQGARSPESDSIQWFHNGNLIPTHTQPSYRFKANNNDSGEYTCQTGQTSLSDPVHLTVLSEWLVLQTPHLEFQEGETIMLRCHSWKDKPLVKVTFFQNGKSQKFSHLDPTFSIPQANHSHSGDYHCTGNIGYTLFSSKPVTITVQVPSMGSSSPMGI

SEQ ID NO: 431 - protein, 429 aa, synthetic construct
QVQLVQSGAEVKKPGASVKVSCKASGYTFTSYVIQWVRQAPGQGLEWMGSINPYNDYTNYAQKFQGRVTMTRDTSISTAYMELSSLRSEDTAVYYCARWGDGNYWGQGTLVTVSSASTKGPSVFPLAPSSKSTSGGTAALGCLVKDYFPEPVTVSWNSGALTSGVHTCPAVLQSSGLYSLSSVVTVPSSSLGTQTYICNVNHKPSNTKVDKKVEPKSSDKTHTGGGGSGGGGSGGGGSAAPPKAVLKLEPPWINVLQEDSVTLTCQGARSPESDSIQWFHNGNLIPTHTQPSYRFKANNNDSGEYTCQTGQTSLSDPVHLTVLSEWLVLQTPHLEFQEGETIMLRCHSWKDKPLVKVTFFQNGKSQKFSHLDPTFSIPQANHSHSGDYHCTGNIGYTLFSSKPVTITVQVPSMGSSSPMGIGGHHHHHH

SEQ ID NO: 432 - protein, 412 aa, synthetic construct
DIQMTQSPSSLSASVGDRVTITCTASSSVSSSYFHWYQQKPGKAPKLLIYSTSNLASGVPSRFSGSGSGTDFTLTISSLQPEDFATYYCHQYHRSPTFGGGTKVEIKRTVAAPSVFIFPPSDEQLKSGTASVVCLLNNFYPREAKVQWKVDNALQSGNSQESVTEQDSKDSTYSLCSTLTLSKADYEKHKVYACEVTHQGLSSPVTKSFNRGESGGGGSGGGGSGGGGSAAPPKAVLKLEPPWINVLQEDSVTLTCQGARSPESDSIQWFHNGNLIPTHTQPSYRFKANNNDSGEYTCQTGQTSLSDPVHLTVLSEWLVLQTPHLEFQEGETIMLRCHSWKDKPLVKVTFFQNGKSQKFSHLDPTFSIPQANHSHSGDYHCTGNIGYTLFSSKPVTITVQVPSMGSSSPMGI

SEQ ID NO: 433 - protein, 435 aa, synthetic construct
QVQLQESGPGLVKPSETLSLTCTVTGYSITSDYAWNWIRQPPGKGLEWIGYIRYSGSTNYNPSLKSRVTISVDTSKNQFSLKLSSVTAADTAVYYCARDWPRPSYWYFDVWGQGTLVTVSSASTKGPSVFPLAPSSKSTSGGTAALGCLVKDYFPEPVTVSWNSGALTSGVHTCPAVLQSSGLYSLSSVVTVPSSSLGTQTYICNVNHKPSNTKVDKKVEPKSSDKTHTGGGGSGGGGSGGGGSAAPPKAVLKLEPPWINVLQEDSVTLTCQGARSPESDSIQWFHNGNLIPTHTQPSYRFKANNNDSGEYTCQTGQTSLSDPVHLTVLSEWLVLQTPHLEFQEGETIMLRCHSWKDKPLVKVTFFQNGKSQKFSHLDPTFSIPQANHSHSGDYHCTGNIGYTLFSSKPVTITVQVPSMGSSSPMGIGGHHHHHH

SEQ ID NO: 434 - protein, 412 aa, synthetic construct
DIQMTQSPSSLSASVGDRVTITCRAGQDISNYLNWYQQKPGKAPKLLIYYTSRLHSGVPSRFSGSGSGTDFTLTISSLQPEDFATYYCQQGHTLPWTFGGGTKVEIKRTVAAPSVFIFPPSDEQLKSGTASVVCLLNNFYPREAKVQWKVDNALQSGNSQESVTEQDSKDSTYSLCSTLTLSKADYEKHKVYACEVTHQGLSSPVTKSFNRGESGGGGSGGGGSGGGGSAAPPKAVLKLEPPWINVLQEDSVTLTCQGARSPESDSIQWFHNGNLIPTHTQPSYRFKANNNDSGEYTCQTGQTSLSDPVHLTVLSEWLVLQTPHLEFQEGETIMLRCHSWKDKPLVKVTFFQNGKSQKFSHLDPTFSIPQANHSHSGDYHCTGNIGYTLFSSKPVTITVQVPSMGSSSPMGI

SEQ ID NO: 435 - protein, 435 aa, synthetic construct
QVQLQESGPGLVKPSETLSLTCTVSGFSLTSYGVHWIRQPPGKGLEWIGVIWPGGGTNYNPSLKSRVTISVDTSKNQFSLKLSSVTAADTAVYYCARDRAYGNYLYAMDYWGQGTLVTVSSASTKGPSVFPLAPSSKSTSGGTAALGCLVKDYFPEPVTVSWNSGALTSGVHTCPAVLQSSGLYSLSSVVTVPSSSLGTQTYICNVNHKPSNTKVDKKVEPKSSDKTHTGGGGSGGGGSGGGGSAAPPKAVLKLEPPWINVLQEDSVTLTCQGARSPESDSIQWFHNGNLIPTHTQPSYRFKANNNDSGEYTCQTGQTSLSDPVHLTVLSEWLVLQTPHLEFQEGETIMLRCHSWKDKPLVKVTFFQNGKSQKFSHLDPTFSIPQANHSHSGDYHCTGNIGYTLFSSKPVTITVQVPSMGSSSPMGIGGHHHHHH

SEQ ID NO: 436 - protein, 416 aa, synthetic construct
DIQMTQSPSSLSASVGDRVTITCRASESVEYYVTSLMQWYQQKPGKAPKLLIYAASNVDSGVPSRFSGSGSGTDFTLTISSLQPEDFATYYCQQSRKVPFTFGGGTKVEIKRTVAAPSVFIFPPSDEQLKSGTASVVCLLNNFYPREAKVQWKVDNALQSGNSQESVTEQDSKDSTYSLCSTLTLSKADYEKHKVYACEVTHQGLSSPVTKSFNRGESGGGGSGGGGSGGGGSAAPPKAVLKLEPPWINVLQEDSVTLTCQGARSPESDSIQWFHNGNLIPTHTQPSYRFKANNNDSGEYTCQTGQTSLSDPVHLTVLSEWLVLQTPHLEFQEGETIMLRCHSWKDKPLVKVTFFQNGKSQKFSHLDPTFSIPQANHSHSGDYHCTGNIGYTLFSSKPVTITVQVPSMGSSSPMGI

SEQ ID NO: 437 - protein, 435 aa, synthetic construct
QVQLVQSGAEVKKPGASVKVSCKASGYTFTEYIIHWVRQAPGQGLEWMGWFYPGSNDINYAQKFQGRVTMTRDTSISTAYMELSSLRSEDTAVYYCARRDDFSGYDALPYWGQGTLVTVSSASTKGPSVFPLAPSSKSTSGGTAALGCLVKDYFPEPVTVSWNSGALTSGVHTCPAVLQSSGLYSLSSVVTVPSSSLGTQTYICNVNHKPSNTKVDKKVEPKSSDKTHTGGGGSGGGGSGGGGSAAPPKAVLKLEPPWINVLQEDSVTLTCQGARSPESDSIQWFHNGNLIPTHTQPSYRFKANNNDSGEYTCQTGQTSLSDPVHLTVLSEWLVLQTPHLEFQEGETIMLRCHSWKDKPLVKVTFFQNGKSQKFSHLDPTFSIPQANHSHSGDYHCTGNIGYTLFSSKPVTITVQVPSMGSSSPMGIGGHHHHHH

SEQ ID NO: 438 - protein, 412 aa, synthetic construct
DIQMTQSPSSLSASVGDRVTITCRTNENIYSNLAWYQQKPGKAPKLLIYAATHLVEGVPSRFSGSGSGTDFTLTISSLQPEDFATYYCQHFWGTPCTFGGGTKVEIKRTVAAPSVFIFPPSDEQLKSGTASVVCLLNNFYPREAKVQWKVDNALQSGNSQESVTEQDSKDSTYSLCSTLTLSKADYEKHKVYACEVTHQGLSSPVTKSFNRGESGGGGSGGGGSGGGGSAAPPKAVLKLEPPWINVLQEDSVTLTCQGARSPESDSIQWFHNGNLIPTHTQPSYRFKANNNDSGEYTCQTGQTSLSDPVHLTVLSEWLVLQTPHLEFQEGETIMLRCHSWKDKPLVKVTFFQNGKSQKFSHLDPTFSIPQANHSHSGDYHCTGNIGYTLFSSKPVTITVQVPSMGSSSPMGI

SEQ ID NO: 439 - protein, 434 aa, synthetic construct
QVQLVQSGAEVKKPGASVKVSCKASGYTFTSYYIHWVRQAPGQGLEWMGCIYPGNVNTNYAQKFQGRVTMTRDTSISTAYMELSSLRSEDTAVYYCARSHYGLDWNFDVWGQGTLVTVSSASTKGPSVFPLAPSSKSTSGGTAALGCLVKDYFPEPVTVSWNSGALTSGVHTCPAVLQSSGLYSLSSVVTVPSSSLGTQTYICNVNHKPSNTKVDKKVEPKSSDKTHTGGGGSGGGGSGGGGSAAPPKAVLKLEPPWINVLQEDSVTLTCQGARSPESDSIQWFHNGNLIPTHTQPSYRFKANNNDSGEYTCQTGQTSLSDPVHLTVLSEWLVLQTPHLEFQEGETIMLRCHSWKDKPLVKVTFFQNGKSQKFSHLDPTFSIPQANHSHSGDYHCTGNIGYTLFSSKPVTITVQVPSMGSSSPMGIGGHHHHHH

SEQ ID NO: 440 - protein, 412 aa, synthetic construct; identical to SEQ ID NO: 367

SEQ ID NO: 441 - protein, 434 aa, synthetic construct
QVQLVQSGAEVKKPGASVKVSCKASGYTFTSYYIHWVRQAPGQGLEWMGSIYPGNVNTNYAQKFQGRVTMTRDTSISTAYMELSSLRSEDTAVYYCARSHYGLDWNFDVWGQGTLVTVSSASTKGPSVFPLAPSSKSTSGGTAALGCLVKDYFPEPVTVSWNSGALTSGVHTCPAVLQSSGLYSLSSVVTVPSSSLGTQTYICNVNHKPSNTKVDKKVEPKSSDKTHTGGGGSGGGGSGGGGSAAPPKAVLKLEPPWINVLQEDSVTLTCQGARSPESDSIQWFHNGNLIPTHTQPSYRFKANNNDSGEYTCQTGQTSLSDPVHLTVLSEWLVLQTPHLEFQEGETIMLRCHSWKDKPLVKVTFFQNGKSQKFSHLDPTFSIPQANHSHSGDYHCTGNIGYTLFSSKPVTITVQVPSMGSSSPMGIGGHHHHHH

SEQ ID NO: 442 - protein, 433 aa, synthetic construct
QVQLVQSGAEVKKPGSSVKVSCKASGYSITSGYHWGWIRQAPGQGLEWIGAIYHSGSTYYSPSLKSRVTITADKSTSTAYMELSSLRSEDTAVYYCARGPLSYYAFDYWGQGTLVTVSSASTKGPSVFPLAPSSKSTSGGTAALGCLVKDYFPEPVTVSWNSGALTSGVHTCPAVLQSSGLYSLSSVVTVPSSSLGTQTYICNVNHKPSNTKVDKKVEPKSSDKTHTGGGGSGGGGSGGGGSAAPPKAVLKLEPPWINVLQEDSVTLTCQGARSPESDSIQWFHNGNLIPTHTQPSYRFKANNNDSGEYTCQTGQTSLSDPVHLTVLSEWLVLQTPHLEFQEGETIMLRCHSWKDKPLVKVTFFQNGKSQKFSHLDPTFSIPQANHSHSGDYHCTGNIGYTLFSSKPVTITVQVPSMGSSSPMGIGGHHHHHH

SEQ ID NO: 443 - protein, 412 aa, synthetic construct
DIQLTQSPSSLSASVGDRVTITCRASQSVSRYLAWYQQKPGKAPKLLIYDASNRATGIPSRFSGSGSGTDFTLTISSLQPEDFATYYCQQYYRSPITFGQGTKVEIKRTVAAPSVFIFPPSDEQLKSGTASVVCLLNNFYPREAKVQWKVDNALQSGNSQESVTEQDSKDSTYSLCSTLTLSKADYEKHKVYACEVTHQGLSSPVTKSFNRGESGGGGSGGGGSGGGGSAAPPKAVLKLEPPWINVLQEDSVTLTCQGARSPESDSIQWFHNGNLIPTHTQPSYRFKANNNDSGEYTCQTGQTSLSDPVHLTVLSEWLVLQTPHLEFQEGETIMLRCHSWKDKPLVKVTFFQNGKSQKFSHLDPTFSIPQANHSHSGDYHCTGNIGYTLFSSKPVTITVQVPSMGSSSPMGI

SEQ ID NO: 444 - protein, 121 aa, synthetic construct
QVQLQESGPGLVKPSETLSLTCTVSGFSLTGYGVNWIRQPPGKGLEWIGMIWGDGSTNYNPSLKSRVTISVDTSKNQFSLKLSSVTAADTAVYYCARDGYSNFHYYVMDYWGQGTLVTVSS

SEQ ID NO: 445 - protein, 111 aa, synthetic construct
DIVMTQSPDSLAVSLGERATINCRASESVEYYVTSLMQWYQQKPGQPPKLLIYAASNVESGVPDRFSGSGSGTDFTLTISSLQAEDVAVYYCQQSRKVPWTFGQGTKVEIK

SEQ ID NO: 446 - protein, 120 aa, synthetic construct
QVQLQESGPGLVKPSETLSLTCTVSGFSLSDYGVHWIRQPPGKGLEWIGVIWAGGGTNYNPSLKSRVTISVDTSKNQFSLKLSSVTAADTAVYYCARDKGYSYYYSMDYWGQGTLVTVSS

SEQ ID NO: 447 - protein, 111 aa, synthetic construct
DIVMTQSPDSLAVSLGERATINCRASESVEYYVTSLMQWYQQKPGQPPKLLIYAASNVESGVPDRFSGSGSGTDFTLTISSLQAEDVAVYYCQQSRKVPYTFGQGTKVEIK

SEQ ID NO: 448 - protein, 115 aa, synthetic construct
QVQLVQSGAEVKKPGASVKVSCKASGYTFTSYVIQWVRQAPGQGLEWMGSINPYNDYTNYAQKFQGRVTMTRDTSISTAYMELSSLRSEDTAVYYCARWGDGNYWGQGTLVTVSS

SEQ ID NO: 449 - protein, 107 aa, synthetic construct
DIQMTQSPSSLSASVGDRVTITCTASSSVSSSYFHWYQQKPGKAPKLLIYSTSNLASGVPSRFSGSGSGTDFTLTISSLQPEDFATYYCHQYHRSPTFGGGTKVEIK

SEQ ID NO: 450 - protein, 121 aa, synthetic construct
QVQLQESGPGLVKPSETLSLTCTVTGYSITSDYAWNWIRQPPGKGLEWIGYIRYSGSTNYNPSLKSRVTISVDTSKNQFSLKLSSVTAADTAVYYCARDWPRPSYWYFDVWGQGTLVTVSS

SEQ ID NO: 451 - protein, 107 aa, synthetic construct
DIQMTQSPSSLSASVGDRVTITCRAGQDISNYLNWYQQKPGKAPKLLIYYTSRLHSGVPSRFSGSGSGTDFTLTISSLQPEDFATYYCQQGHTLPWTFGGGTKVEIK

SEQ ID NO: 452 - protein, 121 aa, synthetic construct
QVQLQESGPGLVKPSETLSLTCTVSGFSLTSYGVHWIRQPPGKGLEWIGVIWPGGGTNYNPSLKSRVTISVDTSKNQFSLKLSSVTAADTAVYYCARDRAYGNYLYAMDYWGQGTLVTVSS

SEQ ID NO: 453 - protein, 111 aa, synthetic construct
DIQMTQSPSSLSASVGDRVTITCRASESVEYYVTSLMQWYQQKPGKAPKLLIYAASNVDSGVPSRFSGSGSGTDFTLTISSLQPEDFATYYCQQSRKVPFTFGGGTKVEIK

SEQ ID NO: 454 - protein, 121 aa, synthetic construct
QVQLVQSGAEVKKPGASVKVSCKASGYTFTEYIIHWVRQAPGQGLEWMGWFYPGSNDINYAQKFQGRVTMTRDTSISTAYMELSSLRSEDTAVYYCARRDDFSGYDALPYWGQGTLVTVSS

SEQ ID NO: 455 - protein, 107 aa, synthetic construct
DIQMTQSPSSLSASVGDRVTITCRTNENIYSNLAWYQQKPGKAPKLLIYAATHLVEGVPSRFSGSGSGTDFTLTISSLQPEDFATYYCQHFWGTPCTFGGGTKVEIK

SEQ ID NO: 456 - protein, 120 aa, synthetic construct
QVQLQQSGPELVKPGTSVRISCEASGYTFTSYYIHWVKQRPGQGLEWIGCIYPGNVNTNYNEKFKDKATLIVDTSSNTAYMQLSRMTSEDSAVYFCTRSHYGLDWNFDVWGAGTTVTVSS

SEQ ID NO: 457 - protein, 107 aa, synthetic construct
DIQMNQSPSSLSASLGDTITITCHASQNIYVWLNWYQQKPGNIPKLLIYKASNLHTGVPSRFSGSGSGTGFTLTISSLQPEDIATYYCQQGQTYPYTFGGGTKLEIK

SEQ ID NO: 458 - protein, 120 aa, synthetic construct
QVQLVQSGAEVKKPGASVKVSCKASGYTFTSYYIHWVRQAPGQGLEWMGCIYPGNVNTNYAQKFQGRVTMTRDTSISTAYMELSSLRSEDTAVYYCARSHYGLDWNFDVWGQGTLVTVSS

SEQ ID NO: 459 - protein, 107 aa, synthetic construct; identical to SEQ ID NO: 212

SEQ ID NO: 460 - protein, 120 aa, synthetic construct
QVQLVQSGAEVKKPGASVKVSCKASGYTFTSYYIHWVRQAPGQGLEWMGSIYPGNVNTNYAQKFQGRVTMTRDTSISTAYMELSSLRSEDTAVYYCARSHYGLDWNFDVWGQGTLVTVSS

SEQ ID NO: 461 - protein, 511 aa, synthetic construct
AAPPKAVLKLEPPWINVLQEDSVTLTCQGARSPESDSIQWFHNGNLIPTHTQPSYRFKANNNDSGEYTCQTGQTSLSDPVHLTVLSEWLVLQTPHLEFQEGETIMLRCHSWKDKPLVKVTFFQNGKSQKFSHLDPTFSIPQANHSHSGDYHCTGNIGYTLFSSKPVTITVQVPSMGSSSPMGIGGGGSGGGGSGGGGSDIQMTQSPSSLSASVGDRVTITCRASQPIGHTLGWYQQKPGKAPKLLIYWASDLIRGVPSRFSGSGSGTDFTLTISSLQPEDFATYYCQQMLRTPFMFGQGTKVEIKGGGGSGGGGSGGGGSAAPPKAVLKLEPPWINVLQEDSVTLTCQGARSPESDSIQWFHNGNLIPTHTQPSYRFKANNNDSGEYTCQTGQTSLSDPVHLTVLSEWLVLQTPHLEFQEGETIMLRCHSWKDKPLVKVTFFQNGKSQKFSHLDPTFSIPQANHSHSGDYHCTGNIGYTLFSSKPVTITVQVPSMGSSSPMGIGGHHHHHH

SEQ ID NO: 462 - protein, 107 aa, synthetic construct
DIQMTQSPSSLSASVGDRVTITCRASQPIGHTLGWYQQKPGKAPKLLIYWASDLIRGVPSRFSGSGSGTDFTLTISSLQPEDFATYYCQQMLRTPFMFGQGTKVEIK

SEQ ID NO: 463 - protein, 377 aa, synthetic construct
EVQLVESGGGLVQPGGSLKLSCAASGFTFNKYAMNWVRQAPGKGLEWVARIRSKYNNYATYYADSVKDRFTISRDDSKNTAYLQMNNLKTEDTAVYYCVRHGNFGNSYISYWAYWGQGTLVTVSSASTKGPSVFPLAPSSKSTSGGTAALGCLVKDYFPEPVTVSWNSGALTSGVHTFPAVLQSSGLYSLSSVVTVPSSSLGTQTYICNVNHKPSNTKVDKKVEPKSSDKTHTGGGGSGGGGSGGGGSQVQLVESGGGLVQPGGSLRLSCAASGLTVNDLYMGWFRQAPGQGLEAVARVTPGDNTDYTYYADSVKGRFTISRDNSKNTLYLQMNSLRAEDTAVYYCAGRRFGSSEWDYWGQGTLVTVSSGGHHHHHH

SEQ ID NO: 464 - protein, 351 aa, synthetic construct
QTVVTQEPSLTVSPGGTVTLTCGSSTGAVTSGNYPNWVQQKPGQAPRGLIGGTKFLAPGTPARFSGSLLGGKAALTLSGVQPEDEAEYYCVLWYSNRWVFGGGTKLTVLSQPKAAPSVTLFPPSSEELQANKATLVCLVSDFYPGAVTVAWKADGSPVKVGVETTKPSKQSNNKYAASSYLSLTPEQWKSHRSYSCRVTHEGSTVEKTVAPAESSGGGGSGGGGSGGGGSQVQLVESGGGLVQPGGSLRLSCAASGLTVNDLYMGWFRQAPGQGLEAVARVTPGDNTDYTYYADSVKGRFTISRDNSKNTLYLQMNSLRAEDTAVYYCAGRRFGSSEWDYWGQGTLVTVSS

SEQ ID NO: 465 - protein, 381 aa, synthetic construct
EVQLVESGGGLVQPGGSLKLSCAASGFTFNKYAMNWVRQAPGKGLEWVARIRSKYNNYATYYADSVKDRFTISRDDSKNTAYLQMNNLKTEDTAVYYCVRHGNFGNSYISYWAYWGQGTLVTVSSASTKGPSVFPLAPSSKSTSGGTAALGCLVKDYFPEPVTVSWNSGALTSGVHTFPAVLQSSGLYSLSSVVTVPSSSLGTQTYICNVNHKPSNTKVDKKVEPKSSDKTHTGGGGSGGGGSGGGGSQVQLVESGGGLVQPGGSLRLSCAASGRAVGNYIIGWFRQAPGQGLEAVATTTRDGGSTYYADSVKGRFTISRDNSKNTLYLQMNSLRAEDTAVYYCAAKSWSVPLRPTSADFDSWGQGTLVTVSSGGHHHHHH

SEQ ID NO: 466 - protein, 355 aa, synthetic construct
QTVVTQEPSLTVSPGGTVTLTCGSSTGAVTSGNYPNWVQQKPGQAPRGLIGGTKFLAPGTPARFSGSLLGGKAALTLSGVQPEDEAEYYCVLWYSNRWVFGGGTKLTVLSQPKAAPSVTLFPPSSEELQANKATLVCLVSDFYPGAVTVAWKADGSPVKVGVETTKPSKQSNNKYAASSYLSLTPEQWKSHRSYSCRVTHEGSTVEKTVAPAESSGGGGSGGGGSGGGGSQVQLVESGGGLVQPGGSLRLSCAASGRAVGNYIIGWFRQAPGQGLEAVATTTRDGGSTYYADSVKGRFTISRDNSKNTLYLQMNSLRAEDTAVYYCAAKSWSVPLRPTSADFDSWGQGTLVTVSS

SEQ ID NO: 467 - protein, 121 aa, synthetic construct
QVQLVESGGGVVQPGRSLRLSCAASGFTFTKAWMHWVRQAPGKQLEWVAQIKDKSNSYATYYADSVKGRFTISRDDSKNTLYLQMNSLRAEDTAVYYCRGVYYALSPFDYWGQGTLVTVSS

SEQ ID NO: 468 - protein, 112 aa, synthetic construct
DIVMTQTPLSLSVTPGQPASISCKSSQSLVHNNANTYLSWYLQKPGQSPQSLIYKVSNRFSGVPDRFSGSGSGTDFTLKISRVEAEDVGVYYCGQGTQYPFTFGSGTKVEIK

SEQ ID NO: 469 - protein, 435 aa, synthetic construct
QVQLVESGGGVVQPGRSLRLSCAASGFTFTKAWMHWVRQAPGKQLEWVAQIKDKSNSYATYYADSVKGRFTISRDDSKNTLYLQMNSLRAEDTAVYYCRGVYYALSPFDYWGQGTLVTVSSASTKGPSVFPLAPSSKSTSGGTAALGCLVKDYFPEPVTVSWNSGALTSGVHTCPAVLQSSGLYSLSSVVTVPSSSLGTQTYICNVNHKPSNTKVDKKVEPKSSDKTHTGGGGSGGGGSGGGGSAAPPKAVLKLEPPWINVLQEDSVTLTCQGARSPESDSIQWFHNGNLIPTHTQPSYRFKANNNDSGEYTCQTGQTSLSDPVHLTVLSEWLVLQTPHLEFQEGETIMLRCHSWKDKPLVKVTFFQNGKSQKFSHLDPTFSIPQANHSHSGDYHCTGNIGYTLFSSKPVTITVQVPSMGSSSPMGIGGHHHHHH

SEQ ID NO: 470 - protein, 417 aa, synthetic construct
DIVMTQTPLSLSVTPGQPASISCKSSQSLVHNNANTYLSWYLQKPGQSPQSLIYKVSNRFSGVPDRFSGSGSGTDFTLKISRVEAEDVGVYYCGQGTQYPFTFGSGTKVEIKRTVAAPSVFIFPPSDEQLKSGTASVVCLLNNFYPREAKVQWKVDNALQSGNSQESVTEQDSKDSTYSLCSTLTLSKADYEKHKVYACEVTHQGLSSPVTKSFNRGESGGGGSGGGGSGGGGSAAPPKAVLKLEPPWINVLQEDSVTLTCQGARSPESDSIQWFHNGNLIPTHTQPSYRFKANNNDSGEYTCQTGQTSLSDPVHLTVLSEWLVLQTPHLEFQEGETIMLRCHSWKDKPLVKVTFFQNGKSQKFSHLDPTFSIPQANHSHSGDYHCTGNIGYTLFSSKPVTITVQVPSMGSSSPMGI

SEQ ID NO: 471 - protein, 528 aa, synthetic construct
AAPPKAVLKLEPPWINVLQEDSVTLTCQGARSPESDSIQWFHNGNLIPTHTQPSYRFKANNNDSGEYTCQTGQTSLSDPVHLTVLSEWLVLQTPHLEFQEGETIMLRCHSWKDKPLVKVTFFQNGKSQKFSHLDPTFSIPQANHSHSGDYHCTGNIGYTLFSSKPVTITVQVPSMGSSSPMGIGGGGSGGGGSGGGGSQVQLVESGGGLVQPGGSLRLSCAASGFTFNKYAMNWFRQAPGQGLEAVARIRSKYNNYATYYADSVKGRFTISRDNSKNTLYLQMNSLRAEDTAVYYCVRHGNFGNSYISYWAYWGQGTLVTVSSGGGGSGGGGSGGGGAAPPKAVLKLEPPWINVLQEDSVTLTCQGARSPESDSIQWFHNGNLIPTHTQPSYRFKANNNDSGEYTCQTGQTSLSDPVHLTVLSEWLVLQTPHLEFQEGETIMLRCHSWKDKPLVKVTFFQNGKSQKFSHLDPTFSIPQANHSHSGDYHCTGNIGYTLFSSKPVTITVQVPSMGSSSPMGIGGHHHHHH

SEQ ID NO: 472 - protein, 524 aa, synthetic construct
AAPPKAVLKLEPPWINVLQEDSVTLTCQGARSPESDSIQWFHNGNLIPTHTQPSYRFKANNNDSGEYTCQTGQTSLSDPVHLTVLSEWLVLQTPHLEFQEGETIMLRCHSWKDKPLVKVTFFQNGKSQKFSHLDPTFSIPQANHSHSGDYHCTGNIGYTLFSSKPVTITVQVPSMGSSSPMGIGGGGSGGGGSGGGGSQVQLVESGGGLVQPGGSLRLSCAASGFTFTKAWMHWFRQAPGQGLEAVAQIKDKSNSYATYYADSVKGRFTISRDNSKNTLYLQMNSLRAEDTAVYYCRGVYYALSPFDYWGQGTLVTVSSGGGGSGGGGSGGGGAAPPKAVLKLEPPWINVLQEDSVTLTCQGARSPESDSIQWFHNGNLIPTHTQPSYRFKANNNDSGEYTCQTGQTSLSDPVHLTVLSEWLVLQTPHLEFQEGETIMLRCHSWKDKPLVKVTFFQNGKSQKFSHLDPTFSIPQANHSHSGDYHCTGNIGYTLFSSKPVTITVQVPSMGSSSPMGIGGHHHHHH

SEQ ID NO: 473 - protein, 526 aa, synthetic construct
AAPPKAVLKLEPPWINVLQEDSVTLTCQGARSPESDSIQWFHNGNLIPTHTQPSYRFKANNNDSGEYTCQTGQTSLSDPVHLTVLSEWLVLQTPHLEFQEGETIMLRCHSWKDKPLVKVTFFQNGKSQKFSHLDPTFSIPQANHSHSGDYHCTGNIGYTLFSSKPVTITVQVPSMGSSSPMGIGGGGSGGGGSGGGGSQVQLVESGGGLVQPGGSLRLSCAASGFPLSSYAMIWFRQAPGQGLEAVAMILRAGNIYYADSVKGRFTISRDNSKNTLYLQMNSLRAEDTAVYYCARRHYNREGYPIGIGDLWGQGTLVTVSSGGGGSGGGGSGGGGAAPPKAVLKLEPPWINVLQEDSVTLTCQGARSPESDSIQWFHNGNLIPTHTQPSYRFKANNNDSGEYTCQTGQTSLSDPVHLTVLSEWLVLQTPHLEFQEGETIMLRCHSWKDKPLVKVTFFQNGKSQKFSHLDPTFSIPQANHSHSGDYHCTGNIGYTLFSSKPVTITVQVPSMGSSSPMGIGGHHHHHH

SEQ ID NO: 474 - protein, 125 aa, synthetic construct
QVQLVESGGGLVQPGGSLRLSCAASGFTFNKYAMNWFRQAPGQGLEAVARIRSKYNNYATYYADSVKGRFTISRDNSKNTLYLQMNSLRAEDTAVYYCVRHGNFGNSYISYWAYWGQGTLVTVSS

SEQ ID NO: 475 - protein, 121 aa, synthetic construct
QVQLVESGGGLVQPGGSLRLSCAASGFTFTKAWMHWFRQAPGQGLEAVAQIKDKSNSYATYYADSVKGRFTISRDNSKNTLYLQMNSLRAEDTAVYYCRGVYYALSPFDYWGQGTLVTVSS

SEQ ID NO: 476 - protein, 123 aa, synthetic construct
QVQLVESGGGLVQPGGSLRLSCAASGFPLSSYAMIWFRQAPGQGLEAVAMILRAGNIYYADSVKGRFTISRDNSKNTLYLQMNSLRAEDTAVYYCARRHYNREGYPIGIGDLWGQGTLVTVSS

SEQ ID NO: 477 - protein, 121 aa, synthetic construct
QVQLVESGGGLVQPGGSLRLSCAASGLTVNDLYMGWFRQAPGQGLEAVARVTPGDNTDYTYYADSVKGRFTISRDNSKNTLYLQMNSLRAEDTAVYYCAGRRFGSSEWDYWGQGTLVTVSS

SEQ ID NO: 478 - protein, 125 aa, synthetic construct
QVQLVESGGGLVQPGGSLRLSCAASGRAVGNYIIGWFRQAPGQGLEAVATTTRDGGSTYYADSVKGRFTISRDNSKNTLYLQMNSLRAEDTAVYYCAAKSWSVPLRPTSADFDSWGQGTLVTVSS

SEQ ID NO: 479 - protein, 117 aa, synthetic construct
QVQLVESGGGLVQPGGSLRLSCAASGYTFTNYWINWFRQAPGQGLEAVADIYPGGGITYYADSVKGRFTISRDNSKNTLYLQMNSLRAEDTAVYYCAASYGKYFDYWGQGTLVTVSS

SEQ ID NO: 480 - protein, 373 aa, synthetic construct
EVQLVESGGGLVQPGGSLKLSCAASGFTFNKYAMNWVRQAPGKGLEWVARIRSKYNNYATYYADSVKDRFTISRDDSKNTAYLQMNNLKTEDTAVYYCVRHGNFGNSYISYWAYWGQGTLVTVSSASTKGPSVFPLAPSSKSTSGGTAALGCLVKDYFPEPVTVSWNSGALTSGVHTFPAVLQSSGLYSLSSVVTVPSSSLGTQTYICNVNHKPSNTKVDKKVEPKSSDKTHTGGGGSGGGGSGGGGSQVQLVESGGGLVQPGGSLRLSCAASGYTFTNYWINWFRQAPGQGLEAVADIYPGGGITYYADSVKGRFTISRDNSKNTLYLQMNSLRAEDTAVYYCAASYGKYFDYWGQGTLVTVSSGGHHHHHH

SEQ ID NO: 481 - protein, 347 aa, synthetic construct
QTVVTQEPSLTVSPGGTVTLTCGSSTGAVTSGNYPNWVQQKPGQAPRGLIGGTKFLAPGTPARFSGSLLGGKAALTLSGVQPEDEAEYYCVLWYSNRWVFGGGTKLTVLSQPKAAPSVTLFPPSSEELQANKATLVCLVSDFYPGAVTVAWKADGSPVKVGVETTKPSKQSNNKYAASSYLSLTPEQWKSHRSYSCRVTHEGSTVEKTVAPAESSGGGGSGGGGSGGGGSQVQLVESGGGLVQPGGSLRLSCAASGYTFTNYWINWFRQAPGQGLEAVADIYPGGGITYYADSVKGRFTISRDNSKNTLYLQMNSLRAEDTAVYYCAASYGKYFDYWGQGTLVTVSS

SEQ ID NO: 482 - protein, 214 aa, synthetic construct
DIQMTQSPSSLSASVGDRVTITCKASQDIKSYLTWYQQKPGKAPKLLIYYSTRLADGVPSRFSGSGSGTDFTLTISSLQPEDFATYYCLQHDESPFTFGGGTKVEIKRTVAAPSVFIFPPSDEQLKSGTASVVCLLNNFYPREAKVQWKVDNALQSGNSQESVTEQDSKDSTYSLCSTLTLSKADYEKHKVYACEVTHQGLSSPVTKSFNRGES

SEQ ID NO: 483 - protein, 447 aa, synthetic construct
QVQLVQSGAEVKKPGASVKVSCKASGYTFTNYWINWVRQAPGQGLEWMGDIYPGGGITNYAQKFQGRVTMTRDTSISTAYMELSSLRSEDTAVYYCARSYGKYFDYWGQGTLVTVSSASTKGPSVFPLAPSSKSTSGGTAALGCLVKDYFPEPVTVSWNSGALTSGVHTCPAVLQSSGLYSLSSVVTVPSSSLGTQTYICNVNHKPSNTKVDKKVEPKSSDKTHTCPPCPAPEAAGGPSVFLFPPKPKDTLMISRTPEVTCVVVDVSHEDPEVKFKWYVDGVEVHNAKTKPREEQYNSTYRVVSVLTVVHQDWLNGKEYKCKVSNKALAAPIEKTISKAKGQPREPQVYTLPPSRDELTKNQVSLWCLVKGFYPSDIAVEWESNGQPENNYKTTPPVLDSDGSFFLYSKLTVDKSRWQQGNVFSCSVMHEALHNHYTQKSLSLSPGK

SEQ ID NO: 484 - protein, 483 aa, synthetic construct
DIQMTQSPSSLSASVGDRVTITCKASQDIKSYLTWYQQKPGKAPKLLIYYSTRLADGVPSRFSGSGSGTDFTLTISSLQPEDFATYYCLQHDESPFTFGGGTKVEIKRTVAAPSVFIFPPSDEQLKSGTASVVCLLNNFYPREAKVQWKVDNALQSGNSQESVTEQDSKDSTYSLSSTLTLSKADYEKHKVYACEVTHQGLSSPVTKSFNRGESGGGGSGGGGSGGGGSEVQLVESGGGLVQPGGSLKLSCAASGFTFNKYAMNWVRQAPGKGLEWVARIRSKYNNYATYYADSVKDRFTISRDDSKNTAYLQMNNLKTEDTAVYYCVRHGNFGNSYISYWAYWGQGTLVTVSSGGGGSGGGGSGGGGSGGGGSQTVVTQEPSLTVSPGGTVTLTCGSSTGAVTSGNYPNWVQQKPGQAPRGLIGGTKFLAPGTPARFSGSLLGGKAALTLSGVQPEDEAEYYCVLWYSNRWVFGGGTKLTVL

SEQ ID NO: 485 - protein, 447 aa, synthetic construct
QVQLVQSGAEVKKPGASVKVSCKASGYTFTNYWINWVRQAPGQGLEWMGDIYPGGGITNYAQKFQGRVTMTRDTSISTAYMELSSLRSEDTAVYYCARSYGKYFDYWGQGTLVTVSSASTKGPSVFPLAPSSKSTSGGTAALGCLVKDYFPEPVTVSWNSGALTSGVHTFPAVLQSSGLYSLSSVVTVPSSSLGTQTYICNVNHKPSNTKVDKKVEPKSSDKTHTCPPCPAPEAAGGPSVFLFPPKPKDTLMISRTPEVTCVVVDVSHEDPEVKFKWYVDGVEVHNAKTKPREEQYNSTYRVVSVLTVVHQDWLNGKEYKCKVSNKALAAPIEKTISKAKGQPREPQVYTLPPSRDELTKNQVSLSCAVKGFYPSDIAVEWESNGQPENNYKTTPPVLDSDGSFFLVSKLTVDKSRWQQGNVFSCSVMHEALHNHYTQKSLSLSPGK

SEQ ID NO: 486 - protein, 6 aa, synthetic construct
RTVAAP

SEQ ID NO: 487 - protein, 596 aa, synthetic construct
DIQMTQSPSSLSASVGDRVTITCKASQDIKSYLTWYQQKPGKAPKLLIYYSTRLADGVPSRFSGSGSGTDFTLTISSLQPEDFATYYCLQHDESPFTFGGGTKVEIKRTVAAPDIQMTQSPSSLSASVGDRVTITCKASQDIKSYLTWYQQKPGKAPKLLIYYSTRLADGVPSRFSGSGSGTDFTLTISSLQPEDFATYYCLQHDESPFTFGGGTKVEIKRTVAAPSVFIFPPSDEQLKSGTASVVCLLNNFYPREAKVQWKVDNALQSGNSQESVTEQDSKDSTYSLCSTLTLSKADYEKHKVYACEVTHQGLSSPVTKSFNRGESGGGGSGGGGSGGGGSEVQLVESGGGLVQPGGSLKLSCAASGFTFNKYAMNWVRQAPGKGLEWVARIRSKYNNYATYYADSVKDRFTISRDDSKNTAYLQMNNLKTEDTAVYYCVRHGNFGNSYISYWAYWGQGTLVTVSSGGGGSGGGGSGGGGSGGGGSQTVVTQEPSLTVSPGGTVTLTCGSSTGAVTSGNYPNWVQQKPGQAPRGLIGGTKFLAPGTPARFSGSLLGGKAALTLSGVQPEDEAEYYCVLWYSNRWVFGGGTKLTVL

SEQ ID NO: 488 - protein, 6 aa, synthetic construct
ASTKGP

SEQ ID NO: 489 - protein, 491 aa, synthetic construct
QVQLVQSGAEVKKPGASVKVSCKASGYTFTNYWINWVRQAPGQGLEWMGDIYPGGGITNYAQKFQGRVTMTRDTSISTAYMELSSLRSEDTAVYYCARSYGKYFDYWGQGTLVTVSSASTKGPQVQLVQSGAEVKKPGASVKVSCKASGYTFTNYWINWVRQAPGQGLEWMGDIYPGGGITNYAQKFQGRVTMTRDTSISTAYMELSSLRSEDTAVYYCARSYGKYFDYWGQGTLVTVSSASTKGPSVFPLAPSSKSTSGGTAALGCLVKDYFPEPVTVSWNSGALTSGVHTCPAVLQSSGLYSLSSVVTVPSSSLGTQTYICNVNHKPSNTKVDKKVEPKSSDKTHTGGGGSGGGGSGGGGSGGGGSEVQLVESGGGLVQPGNSLRLSCAASGFTFSSFGMSWVRQAPGKGLEWVSSISGSGSDTLYADSVKGRFTISRDNAKTTLYLQMNSLRPEDTAVYYCTIGGSLSRSSQGTLVTVSSGGHHHHHH

SEQ ID NO: 490 - protein, 605 aa, synthetic construct
DIQMTQSPSSLSASVGDRVTITCKASQDIKSYLTWYQQKPGKAPKLLIYYSTRLADGVPSRFSGSGSGTDFTLTISSLQPEDFATYYCLQHDESPFTFGGGTKVEIKGGGGSGGGGSGGGGSDIQMTQSPSSLSASVGDRVTITCKASQDIKSYLTWYQQKPGKAPKLLIYYSTRLADGVPSRFSGSGSGTDFTLTISSLQPEDFATYYCLQHDESPFTFGGGTKVEIKRTVAAPSVFIFPPSDEQLKSGTASVVCLLNNFYPREAKVQWKVDNALQSGNSQESVTEQDSKDSTYSLCSTLTLSKADYEKHKVYACEVTHQGLSSPVTKSFNRGESGGGGSGGGGSGGGGSEVQLVESGGGLVQPGGSLKLSCAASGFTFNKYAMNWVRQAPGKGLEWVARIRSKYNNYATYYADSVKDRFTISRDDSKNTAYLQMNNLKTEDTAVYYCVRHGNFGNSYISYWAYWGQGTLVTVSSGGGGSGGGGSGGGGSGGGGSQTVVTQEPSLTVSPGGTVTLTCGSSTGAVTSGNYPNWVQQKPGQAPRGLIGGTKFLAPGTPARFSGSLLGGKAALTLSGVQPEDEAEYYCVLWYSNRWVFGGGTKLTVL

SEQ ID NO: 491 - protein, 500 aa, synthetic construct
QVQLVQSGAEVKKPGASVKVSCKASGYTFTNYWINWVRQAPGQGLEWMGDIYPGGGITNYAQKFQGRVTMTRDTSISTAYMELSSLRSEDTAVYYCARSYGKYFDYWGQGTLVTVSSGGGGSGGGGSGGGGSQVQLVQSGAEVKKPGASVKVSCKASGYTFTNYWINWVRQAPGQGLEWMGDIYPGGGITNYAQKFQGRVTMTRDTSISTAYMELSSLRSEDTAVYYCARSYGKYFDYWGQGTLVTVSSASTKGPSVFPLAPSSKSTSGGTAALGCLVKDYFPEPVTVSWNSGALTSGVHTCPAVLQSSGLYSLSSVVTVPSSSLGTQTYICNVNHKPSNTKVDKKVEPKSSDKTHTGGGGSGGGGSGGGGSGGGGSEVQLVESGGGLVQPGNSLRLSCAASGFTFSSFGMSWVRQAPGKGLEWVSSISGSGSDTLYADSVKGRFTISRDNAKTTLYLQMNSLRPEDTAVYYCTIGGSLSRSSQGTLVTVSSGGHHHHHH

SEQ ID NO: 492 - protein, 436 aa, synthetic construct
QVQLKQSGPGSVQSSQSLSITCTVSGFSLTTYAVHWVRQSPGKGLEWLGVIWSGGITDYNAAFISRLSITKDDSKSQVFFKMNSLQPNDTAIYYCARNGGDNYPYYYAMDYWGQGTSVTVSSASTKGPSVFPLAPSSKSTSGGTAALGCLVKDYFPEPVTVSWNSGALTSGVHTCPAVLQSSGLYSLSSVVTVPSSSLGTQTYICNVNHKPSNTKVDKKVEPKSSDKTHTGGGGSGGGGSGGGGSAAPPKAVLKLEPPWINVLQEDSVTLTCQGARSPESDSIQWFHNGNLIPTHTQPSYRFKANNNDSGEYTCQTGQTSLSDPVHLTVLSEWLVLQTPHLEFQEGETIMLRCHSWKDKPLVKVTFFQNGKSQKFSHLDPTFSIPQANHSHSGDYHCTGNIGYTLFSSKPVTITVQVPSMGSSSPMGIGGHHHHHH

SEQ ID NO: 493 - protein, 417 aa, synthetic construct
DIVMTQAAFSNPVTLGTSASISCRSSKSLLHSNGITYLYWYLQKPGQSPQLLIYQMSNLASGVPDRFSSSGSGTDFTLRISRVEAEDVGVYYCAQNLELPLTFGAGTKLELKRTVAAPSVFIFPPSDEQLKSGTASVVCLLNNFYPREAKVQWKVDNALQSGNSQESVTEQDSKDSTYSLCSTLTLSKADYEKHKVYACEVTHQGLSSPVTKSFNRGESGGGGSGGGGSGGGGSAAPPKAVLKLEPPWINVLQEDSVTLTCQGARSPESDSIQWFHNGNLIPTHTQPSYRFKANNNDSGEYTCQTGQTSLSDPVHLTVLSEWLVLQTPHLEFQEGETIMLRCHSWKDKPLVKVTFFQNGKSQKFSHLDPTFSIPQANHSHSGDYHCTGNIGYTLFSSKPVTITVQVPSMGSSSPMGI

SEQ ID NO: 494 - protein, 436 aa, synthetic construct
QVQLQESGPGLVKPSETLSLTCTVSGFSLTTYAVHWIRQPPGKGLEWIGVIWSGGITNYNPSLKSRVTISVDTSKNQFSLKLSSVTAADTAVYYCARNGGDNYPYYYAMDYWGQGTLVTVSSASTKGPSVFPLAPSSKSTSGGTAALGCLVKDYFPEPVTVSWNSGALTSGVHTCPAVLQSSGLYSLSSVVTVPSSSLGTQTYICNVNHKPSNTKVDKKVEPKSSDKTHTGGGGSGGGGSGGGGSAAPPKAVLKLEPPWINVLQEDSVTLTCQGARSPESDSIQWFHNGNLIPTHTQPSYRFKANNNDSGEYTCQTGQTSLSDPVHLTVLSEWLVLQTPHLEFQEGETIMLRCHSWKDKPLVKVTFFQNGKSQKFSHLDPTFSIPQANHSHSGDYHCTGNIGYTLFSSKPVTITVQVPSMGSSSPMGIGGHHHHHH

SEQ ID NO: 495 - protein, 417 aa, synthetic construct
DIVMTQSPLSLPVTPGEPASISCRSSKSLLHSNGITYLYWYLQKPGQSPQLLIYQMSNLASGVPDRFSGSGSGTDFTLKISRVEAEDVGVYYCAQNLELPLTFGGGTKVEIKRTVAAPSVFIFPPSDEQLKSGTASVVCLLNNFYPREAKVQWKVDNALQSGNSQESVTEQDSKDSTYSLCSTLTLSKADYEKHKVYACEVTHQGLSSPVTKSFNRGESGGGGSGGGGSGGGGSAAPPKAVLKLEPPWINVLQEDSVTLTCQGARSPESDSIQWFHNGNLIPTHTQPSYRFKANNNDSGEYTCQTGQTSLSDPVHLTVLSEWLVLQTPHLEFQEGETIMLRCHSWKDKPLVKVTFFQNGKSQKFSHLDPTFSIPQANHSHSGDYHCTGNIGYTLFSSKPVTITVQVPSMGSSSPMGI

SEQ ID NO: 496 - protein, 435 aa, synthetic construct
QVQLQQWGAGLLKPSETLSLTCAVYGGSFSGYYWSWIRQSPEKGLEWIGEINHGGYVTYNPSLESRVTISVDTSKNQFSLKLSSVTAADTAVYYCARDYGPGNYDWYFDLWGRGTLVTVSSASTKGPSVFPLAPSSKSTSGGTAALGCLVKDYFPEPVTVSWNSGALTSGVHTCPAVLQSSGLYSLSSVVTVPSSSLGTQTYICNVNHKPSNTKVDKKVEPKSSDKTHTGGGGSGGGGSGGGGSAAPPKAVLKLEPPWINVLQEDSVTLTCQGARSPESDSIQWFHNGNLIPTHTQPSYRFKANNNDSGEYTCQTGQTSLSDPVHLTVLSEWLVLQTPHLEFQEGETIMLRCHSWKDKPLVKVTFFQNGKSQKFSHLDPTFSIPQANHSHSGDYHCTGNIGYTLFSSKPVTITVQVPSMGSSSPMGIGGHHHHHH

SEQ ID NO: 497 - protein, 414 aa, synthetic construct
EIVLTQSPATLSLSPGERATLSCRASQSVSSYLAWYQQKPGQAPRLLIYDASNRATGIPARFSGSGSGTDFTLTISSLEPEDFAVYYCQQRSNWPPALTFGGGTKVEIKRTVAAPSVFIFPPSDEQLKSGTASVVCLLNNFYPREAKVQWKVDNALQSGNSQESVTEQDSKDSTYSLCSTLTLSKADYEKHKVYACEVTHQGLSSPVTKSFNRGESGGGGSGGGGSGGGGSAAPPKAVLKLEPPWINVLQEDSVTLTCQGARSPESDSIQWFHNGNLIPTHTQPSYRFKANNNDSGEYTCQTGQTSLSDPVHLTVLSEWLVLQTPHLEFQEGETIMLRCHSWKDKPLVKVTFFQNGKSQKFSHLDPTFSIPQANHSHSGDYHCTGNIGYTLFSSKPVTITVQVPSMGSSSPMGI

SEQ ID NO: 498 - protein, 430 aa, synthetic construct
EVQLVQSGAEVKKPGESLRISCKGSGYSFSTYWISWVRQMPGKGLEWMGKIYPGDSYTNYSPSFQGQVTISADKSISTAYLQWSSLKASDTAMYYCARGYGIFDYWGQGTLVTVSSASTKGPSVFPLAPSSKSTSGGTAALGCLVKDYFPEPVTVSWNSGALTSGVHTCPAVLQSSGLYSLSSVVTVPSSSLGTQTYICNVNHKPSNTKVDKKVEPKSSDKTHTGGGGSGGGGSGGGGSAAPPKAVLKLEPPWINVLQEDSVTLTCQGARSPESDSIQWFHNGNLIPTHTQPSYRFKANNNDSGEYTCQTGQTSLSDPVHLTVLSEWLVLQTPHLEFQEGETIMLRCHSWKDKPLVKVTFFQNGKSQKFSHLDPTFSIPQANHSHSGDYHCTGNIGYTLFSSKPVTITVQVPSMGSSSPMGIGGHHHHHH

SEQ ID NO: 499 - protein, 412 aa, synthetic construct
SYELTQPPSVSVSPGQTASITCSGDNIGDQYAHWYQQKPGQSPVLVIYQDKNRPSGIPERFSGSNSGNTATLTISGTQAMDEADYYCATYTGFGSLAVFGGGTKLTVLSQPKAAPSVTLFPPSSEELQANKATLVCLVSDFYPGAVTVAWKADGSPVKVGVETTKPSKQSNNKYAACSYLSLTPEQWKSHRSYSCRVTHEGSTVEKTVAPAESSGGGGSGGGGSGGGGSAAPPKAVLKLEPPWINVLQEDSVTLTCQGARSPESDSIQWFHNGNLIPTHTQPSYRFKANNNDSGEYTCQTGQTSLSDPVHLTVLSEWLVLQTPHLEFQEGETIMLRCHSWKDKPLVKVTFFQNGKSQKFSHLDPTFSIPQANHSHSGDYHCTGNIGYTLFSSKPVTITVQVPSMGSSSPMGI

SEQ ID NO: 500 - protein, 433 aa, synthetic construct
QVQLVQSGAEVVKPGASVKLSCKASGYTFSSYWMHWVKQAPGQVLEWIGEINPGNGHTNYNEKFKSKATLTVDKSASTAYMELSSLRSEDTAVYYCARSFTTARAFAYWGQGTLVTVSSASTKGPSVFPLAPSSKSTSGGTAALGCLVKDYFPEPVTVSWNSGALTSGVHTCPAVLQSSGLYSLSSVVTVPSSSLGTQTYICNVNHKPSNTKVDKKVEPKSSDKTHTGGGGSGGGGSGGGGSAAPPKAVLKLEPPWINVLQEDSVTLTCQGARSPESDSIQWFHNGNLIPTHTQPSYRFKANNNDSGEYTCQTGQTSLSDPVHLTVLSEWLVLQTPHLEFQEGETIMLRCHSWKDKPLVKVTFFQNGKSQKFSHLDPTFSIPQANHSHSGDYHCTGNIGYTLFSSKPVTITVQVPSMGSSSPMGIGGHHHHHH

SEQ ID NO: 501 - protein, 412 aa, synthetic construct
DIVMTQSPATQSVSPGERVTLSCRASQTISDYLHWYQQKPGQSPRLLIKYASQSISGIPSRFSGSGSGSDFTLTISSVEPEDFGVYYCQDGHSFPPTFGGGTKLEIKRTVAAPSVFIFPPSDEQLKSGTASVVCLLNNFYPREAKVQWKVDNALQSGNSQESVTEQDSKDSTYSLCSTLTLSKADYEKHKVYACEVTHQGLSSPVTKSFNRGESGGGGSGGGGSGGGGSAAPPKAVLKLEPPWINVLQEDSVTLTCQGARSPESDSIQWFHNGNLIPTHTQPSYRFKANNNDSGEYTCQTGQTSLSDPVHLTVLSEWLVLQTPHLEFQEGETIMLRCHSWKDKPLVKVTFFQNGKSQKFSHLDPTFSIPQANHSHSGDYHCTGNIGYTLFSSKPVTITVQVPSMGSSSPMGI

SEQ ID NO: 502 - protein, 433 aa, synthetic construct
QVQLVQSGAEVKKPGASVKVSCKASGYTFSSYWMHWVRQAPGQRLEWMGEINPGNGHTNYSQKFQGRVTITVDKSASTAYMELSSLRSEDTAVYYCARSFTTARAFAYWGQGTLVTVSSASTKGPSVFPLAPSSKSTSGGTAALGCLVKDYFPEPVTVSWNSGALTSGVHTCPAVLQSSGLYSLSSVVTVPSSSLGTQTYICNVNHKPSNTKVDKKVEPKSSDKTHTGGGGSGGGGSGGGGSAAPPKAVLKLEPPWINVLQEDSVTLTCQGARSPESDSIQWFHNGNLIPTHTQPSYRFKANNNDSGEYTCQTGQTSLSDPVHLTVLSEWLVLQTPHLEFQEGETIMLRCHSWKDKPLVKVTFFQNGKSQKFSHLDPTFSIPQANHSHSGDYHCTGNIGYTLFSSKPVTITVQVPSMGSSSPMGIGGHHHHHH

SEQ ID NO: 503 - protein, 412 aa, synthetic construct
DIVMTQSPPTLSLSPGERVTLSCRASQSISDYLHWYQQKPGQSPRLLIKYASQSISGIPARFSGSGSGTDFTLTISSLEPEDFAVYYCQDGHSFPPTFGGGTKVEIKRTVAAPSVFIFPPSDEQLKSGTASVVCLLNNFYPREAKVQWKVDNALQSGNSQESVTEQDSKDSTYSLCSTLTLSKADYEKHKVYACEVTHQGLSSPVTKSFNRGESGGGGSGGGGSGGGGSAAPPKAVLKLEPPWINVLQEDSVTLTCQGARSPESDSIQWFHNGNLIPTHTQPSYRFKANNNDSGEYTCQTGQTSLSDPVHLTVLSEWLVLQTPHLEFQEGETIMLRCHSWKDKPLVKVTFFQNGKSQKFSHLDPTFSIPQANHSHSGDYHCTGNIGYTLFSSKPVTITVQVPSMGSSSPMGI

SEQ ID NO: 504 - protein, 119 aa, synthetic construct
QVQLVQSGAEVVKPGASVKLSCKASGYTFSSYWMHWVKQAPGQVLEWIGEINPGNGHTNYNEKFKSKATLTVDKSASTAYMELSSLRSEDTAVYYCARSFTTARAFAYWGQGTLVTVSS

SEQ ID NO: 505 - protein, 107 aa, synthetic construct
DIVMTQSPATQSVSPGERVTLSCRASQTISDYLHWYQQKPGQSPRLLIKYASQSISGIPSRFSGSGSGSDFTLTISSVEPEDFGVYYCQDGHSFPPTFGGGTKLEIK

SEQ ID NO: 506 - protein, 122 aa, synthetic construct
QVQLQESGPGLVKPSETLSLTCTVSGFSLTTYAVHWIRQPPGKGLEWIGVIWSGGITNYNPSLKSRVTISVDTSKNQFSLKLSSVTAADTAVYYCARNGGDNYPYYYAMDYWGQGTLVTVSS

SEQ ID NO: 507 - protein, 112 aa, synthetic construct
DIVMTQSPLSLPVTPGEPASISCRSSKSLLHSNGITYLYWYLQKPGQSPQLLIYQMSNLASGVPDRFSGSGSGTDFTLKISRVEAEDVGVYYCAQNLELPLTFGGGTKVEIK

SEQ ID NO: 508 - protein, 433 aa, synthetic construct
QVQLVESGGGVVQPGRSLRLSCAASGFTFSSYVLHWVRQAPGKGLDWVAVISDDGRNKYFADSVKGRFTISRDNSKNTLYLQMNSLRAEDTAVYYCVREGYSGSWFDYWGQGTLVTVSSASTKGPSVFPLAPSSKSTSGGTAALGCLVKDYFPEPVTVSWNSGALTSGVHTCPAVLQSSGLYSLSSVVTVPSSSLGTQTYICNVNHKPSNTKVDKKVEPKSSDKTHTGGGGSGGGGSGGGGSAAPPKAVLKLEPPWINVLQEDSVTLTCQGARSPESDSIQWFHNGNLIPTHTQPSYRFKANNNDSGEYTCQTGQTSLSDPVHLTVLSEWLVLQTPHLEFQEGETIMLRCHSWKDKPLVKVTFFQNGKSQKFSHLDPTFSIPQANHSHSGDYHCTGNIGYTLFSSKPVTITVQVPSMGSSSPMGIGGHHHHHH

SEQ ID NO: 509 - protein, 412 aa, synthetic construct
AIQLTQSPSSLSASVGDRVTITCRASQGISSALAWYQQKPGKAPKLLIYGASSLEGGVPSRFSGSGSGTDFTLTISSLQPEDFATYYCQQFNSYPFTFGPGTKVDIKRTVAAPSVFIFPPSDEQLKSGTASVVCLLNNFYPREAKVQWKVDNALQSGNSQESVTEQDSKDSTYSLCSTLTLSKADYEKHKVYACEVTHQGLSSPVTKSFNRGESGGGGSGGGGSGGGGSAAPPKAVLKLEPPWINVLQEDSVTLTCQGARSPESDSIQWFHNGNLIPTHTQPSYRFKANNNDSGEYTCQTGQTSLSDPVHLTVLSEWLVLQTPHLEFQEGETIMLRCHSWKDKPLVKVTFFQNGKSQKFSHLDPTFSIPQANHSHSGDYHCTGNIGYTLFSSKPVTITVQVPSMGSSSPMGI

SEQ ID NO: 510 - protein, 433 aa, synthetic construct
QVQLVESGGGVVQPGRSLRLSCAASGFTFSSYAMHWVRQAPGKGLEWVAVISYDGRNKDYADSVKGRFTISRDNSKNTLYLQMNSLRAEDTAVHYCARLDWGYDAFDIWGQGTMVTVSSASTKGPSVFPLAPSSKSTSGGTAALGCLVKDYFPEPVTVSWNSGALTSGVHTCPAVLQSSGLYSLSSVVTVPSSSLGTQTYICNVNHKPSNTKVDKKVEPKSSDKTHTGGGGSGGGGSGGGGSAAPPKAVLKLEPPWINVLQEDSVTLTCQGARSPESDSIQWFHNGNLIPTHTQPSYRFKANNNDSGEYTCQTGQTSLSDPVHLTVLSEWLVLQTPHLEFQEGETIMLRCHSWKDKPLVKVTFFQNGKSQKFSHLDPTFSIPQANHSHSGDYHCTGNIGYTLFSSKPVTITVQVPSMGSSSPMGIGGHHHHHH

SEQ ID NO: 511 - protein, 414 aa, synthetic construct
EIVLTQSPGTLSLSPGERATLSCRASQSVSSSYLAWYQQKPGQAPRLLIYGASSRATGIPDRFSGSGSGTDFTLTISRLEPEDFAVYYCQQYGSSPPYTFGQGTKLEIKRTVAAPSVFIFPPSDEQLKSGTASVVCLLNNFYPREAKVQWKVDNALQSGNSQESVTEQDSKDSTYSLCSTLTLSKADYEKHKVYACEVTHQGLSSPVTKSFNRGESGGGGSGGGGSGGGGSAAPPKAVLKLEPPWINVLQEDSVTLTCQGARSPESDSIQWFHNGNLIPTHTQPSYRFKANNNDSGEYTCQTGQTSLSDPVHLTVLSEWLVLQTPHLEFQEGETIMLRCHSWKDKPLVKVTFFQNGKSQKFSHLDPTFSIPQANHSHSGDYHCTGNIGYTLFSSKPVTITVQVPSMGSSSPMGI

SEQ ID NO: 512 - protein, 437 aa, synthetic construct
EIQLQQTGPELVKPGASVKISCKASGYSFTDYIIFWVKQSHGKSLEWTGNINPYYGSTSYNLKFKGKATLTVDKSSSTAYMQLNSLTSEDSAVYYCVRGVYYYGSSYEAFPYWGQGTLVTVSAASTKGPSVFPLAPSSKSTSGGTAALGCLVKDYFPEPVTVSWNSGALTSGVHTCPAVLQSSGLYSLSSVVTVPSSSLGTQTYICNVNHKPSNTKVDKKVEPKSSDKTHTGGGGSGGGGSGGGGSAAPPKAVLKLEPPWINVLQEDSVTLTCQGARSPESDSIQWFHNGNLIPTHTQPSYRFKANNNDSGEYTCQTGQTSLSDPVHLTVLSEWLVLQTPHLEFQEGETIMLRCHSWKDKPLVKVTFFQNGKSQKFSHLDPTFSIPQANHSHSGDYHCTGNIGYTLFSSKPVTITVQVPSMGSSSPMGIGGHHHHHH

SEQ ID NO: 513 - protein, 417 aa, synthetic construct
DIQLTQSPLTLSITIGQPASISCKSSQSLLDSDGKTYLNWLLQRPGQSPTRLIYLVSKLDSGVPDRFTGSGSGTDFTLKISRVEAEDLGIYYCWQGAHFPQTFGGGTKLEIKRTVAAPSVFIFPPSDEQLKSGTASVVCLLNNFYPREAKVQWKVDNALQSGNSQESVTEQDSKDSTYSLCSTLTLSKADYEKHKVYACEVTHQGLSSPVTKSFNRGESGGGGSGGGGSGGGGSAAPPKAVLKLEPPWINVLQEDSVTLTCQGARSPESDSIQWFHNGNLIPTHTQPSYRFKANNNDSGEYTCQTGQTSLSDPVHLTVLSEWLVLQTPHLEFQEGETIMLRCHSWKDKPLVKVTFFQNGKSQKFSHLDPTFSIPQANHSHSGDYHCTGNIGYTLFSSKPVTITVQVPSMGSSSPMGI

SEQ ID NO: 514 - protein, 437 aa, synthetic construct
QVQLVQSGAEVKKPGASVKVSCKASGYSFTDYIIFWVRQAPGQGLEWMGNINPYYGSTNYAQKFQGRVTMTRDTSISTAYMELSSLRSEDTAVYYCARGVYYYGSSYEAFPYWGQGTLVTVSSASTKGPSVFPLAPSSKSTSGGTAALGCLVKDYFPEPVTVSWNSGALTSGVHTCPAVLQSSGLYSLSSVVTVPSSSLGTQTYICNVNHKPSNTKVDKKVEPKSSDKTHTGGGGSGGGGSGGGGSAAPPKAVLKLEPPWINVLQEDSVTLTCQGARSPESDSIQWFHNGNLIPTHTQPSYRFKANNNDSGEYTCQTGQTSLSDPVHLTVLSEWLVLQTPHLEFQEGETIMLRCHSWKDKPLVKVTFFQNGKSQKFSHLDPTFSIPQANHSHSGDYHCTGNIGYTLFSSKPVTITVQVPSMGSSSPMGIGGHHHHHH

SEQ ID NO: 515 - protein, 417 aa, synthetic construct
DIVMTQSPLSLPVTPGEPASISCKSSQSLLDSDGKTYLNWYLQKPGQSPQLLIYLVSKLDSGVPDRFSGSGSGTDFTLKISRVEAEDVGVYYCWQGAHFPQTFGGGTKVEIKRTVAAPSVFIFPPSDEQLKSGTASVVCLLNNFYPREAKVQWKVDNALQSGNSQESVTEQDSKDSTYSLCSTLTLSKADYEKHKVYACEVTHQGLSSPVTKSFNRGESGGGGSGGGGSGGGGSAAPPKAVLKLEPPWINVLQEDSVTLTCQGARSPESDSIQWFHNGNLIPTHTQPSYRFKANNNDSGEYTCQTGQTSLSDPVHLTVLSEWLVLQTPHLEFQEGETIMLRCHSWKDKPLVKVTFFQNGKSQKFSHLDPTFSIPQANHSHSGDYHCTGNIGYTLFSSKPVTITVQVPSMGSSSPMGI

SEQ ID NO: 516 - protein, 123 aa, synthetic construct
QVQLVQSGAEVKKPGASVKVSCKASGYSFTDYIIFWVRQAPGQGLEWMGNINPYYGSTNYAQKFQGRVTMTRDTSISTAYMELSSLRSEDTAVYYCARGVYYYGSSYEAFPYWGQGTLVTVSS

SEQ ID NO: 517 - protein, 112 aa, synthetic construct
DIVMTQSPLSLPVTPGEPASISCKSSQSLLDSDGKTYLNWYLQKPGQSPQLLIYLVSKLDSGVPDRFSGSGSGTDFTLKISRVEAEDVGVYYCWQGAHFPQTFGGGTKVEIK

SEQ ID NO: 518 - protein, 107 aa, synthetic construct
AKTTAPSVYPLAPVSGDTTGSSVTLGCLVKGYFPEPVTLTWNSGSLSSGVHTCPAVLQSDLYTLSSSVTVTSSTWPSQSITCNVAHPASSTKVDKKIEPKSSDKTHT

SEQ ID NO: 519 - protein, 107 aa, synthetic construct
RADAAPTVSIFPPSSEQLTSGGASVVCFLNNFYPKDINVKWKIDGSERQNGVLNSWTDQDSKDSTYSMCSTLTLTKDEYERHNSYTCEATHKTSTSPIVKSFNRNES

SEQ ID NO: 520 - protein, 557 aa, synthetic construct
EVYLVESGGGLVQPGGSVKLSCSASGFTFSTFPMAWVRQAPTQGLQWVATLSPSGDSTYYRDSVKGRFTISRDNVLNTLYLHMDILRSEDTATYYCTKVGFTTFYFDSWGQGVMVAVSSAKTTAPSVYPLAPVSGDTTGSSVTLGCLVKGYFPEPVTLTWNSGSLSSGVHTCPAVLQSDLYTLSSSVTVTSSTWPSQSITCNVAHPASSTKVDKKIEPKSSDKTHTGGGGSGGGGSGGGGSTHDLPKAVVKLEPPWIQVLKEDTVTLTCEGTHNPGNSSTQWFHNGRSIRSQVQASYTFKATVNDSGEYRCQMEQTRLSDPVDLGVISDWLLLQTPQLVFLEGETITLRCHSWRNKLLNRISFFHNEKSVRYHHYSSNFSIPKANHSHSGDYYCKGSLGRTLHQSKPVTITVQGPKSSRGGGGSGGGGSGGGGSQVQLQESGGGLVQPGGSLRLSCEASGFTFSRFGMTWVRQAPGKGVEWVSGISSLGDSTLYADSVKGRFTISRDNAKNTLYLQMNSLKPEDTAVYYCTIGGSLNPGGQGTQVTVSSGGHHHHHH

SEQ ID NO: 521 - protein, 406 aa, synthetic construct
DIQMTQSPSFLSASVGDRVTINCKASQNINKYLDWYQQKFGETPKLLIYNINNLHSGVPSRFSGSGSGPDFTLTISSLQPEDVATYFCLQHRTGWTFGGGTKVELRRADAAPTVSIFPPSSEQLTSGGASVVCFLNNFYPKDINVKWKIDGSERQNGVLNSWTDQDSKDSTYSMCSTLTLTKDEYERHNSYTCEATHKTSTSPIVKSFNRNESGGGGSGGGGSGGGGSTHDLPKAVVKLEPPWIQVLKEDTVTLTCEGTHNPGNSSTQWFHNGRSIRSQVQASYTFKATVNDSGEYRCQMEQTRLSDPVDLGVISDWLLLQTPQLVFLEGETITLRCHSWRNKLLNRISFFHNEKSVRYHHYSSNFSIPKANHSHSGDYYCKGSLGRTLHQSKPVTITVQGPKSSR

SEQ ID NO: 522 - protein, 504 aa, synthetic construct
EVYLVESGGGLVQPGGSVKLSCSASGFTFSTFPMAWVRQAPTQGLQWVATLSPSGDSTYYRDSVKGRFTISRDNVLNTLYLHMDILRSEDTATYYCTKVGFTTFYFDSWGQGVMVAVSSAKTTAPSVYPLAPVSGDTTGSSVTLGCLVKGYFPEPVTLTWNSGSLSSGVHTCPAVLQSDLYTLSSSVTVTSSTWPSQSITCNVAHPASSTKVDKKIEPKSSDKTHTGGGGSGGGGSGGGGSQVQLQESGGGLVQAGGSLRLSCAASGRAVGNYIIGWFRQAPGKEREFVATTTRDGGSTFYADSVKGRFTISRDNAKNTVNLQMNSLEPEDTAVYYCAAKSWSVPLRPTSADFDSWGQGTQVTVSSGGGGSGGGGSGGGGSQVQLQESGGGLVQPGGSLRLSCEASGFTFSRFGMTWVRQAPGKGVEWVSGISSLGDSTLYADSVKGRFTISRDNAKNTLYLQMNSLKPEDTAVYYCTIGGSLNPGGQGTQVTVSSGGHHHHHH

SEQ ID NO: 523 - protein, 353 aa, synthetic construct
DIQMTQSPSFLSASVGDRVTINCKASQNINKYLDWYQQKFGETPKLLIYNINNLHSGVPSRFSGSGSGPDFTLTISSLQPEDVATYFCLQHRTGWTFGGGTKVELRRADAAPTVSIFPPSSEQLTSGGASVVCFLNNFYPKDINVKWKIDGSERQNGVLNSWTDQDSKDSTYSMCSTLTLTKDEYERHNSYTCEATHKTSTSPIVKSFNRNESGGGGSGGGGSGGGGSQVQLQESGGGLVQAGGSLRLSCAASGRAVGNYIIGWFRQAPGKEREFVATTTRDGGSTFYADSVKGRFTISRDNAKNTVNLQMNSLEPEDTAVYYCAAKSWSVPLRPTSADFDSWGQGTQVTVSS

SEQ ID NO: 524 - protein, 554 aa, synthetic construct
EVQLVESGGGLVQPGKSLKLSCEASGFTFSGYGMHWVRQAPGRGLESVAYITSSSINIKYADAVKGRFTVSRDNAKNLLFLQMNILKSEDTAMYYCARFDWDKNYWGQGTMVTVSSAKTTAPSVYPLAPVSGDTTGSSVTLGCLVKGYFPEPVTLTWNSGSLSSGVHTCPAVLQSDLYTLSSSVTVTSSTWPSQSITCNVAHPASSTKVDKKIEPKSSDKTHTGGGGSGGGGSGGGGSTHDLPKAVVKLEPPWIQVLKEDTVTLTCEGTHNPGNSSTQWFHNGRSIRSQVQASYTFKATVNDSGEYRCQMEQTRLSDPVDLGVISDWLLLQTPQLVFLEGETITLRCHSWRNKLLNRISFFHNEKSVRYHHYSSNFSIPKANHSHSGDYYCKGSLGRTLHQSKPVTITVQGPKSSRGGGGSGGGGSGGGGSQVQLQESGGGLVQPGGSLRLSCEASGFTFSRFGMTWVRQAPGKGVEWVSGISSLGDSTLYADSVKGRFTISRDNAKNTLYLQMNSLKPEDTAVYYCTIGGSLNPGGQGTQVTVSSGGHHHHHH

SEQ ID NO: 525 - protein, 407 aa, synthetic construct
DIQMTQSPSSLPASLGDRVTINCQASQDISNYLNWYQQKPGKAPKLLIYYTNKLADGVPSRFSGSGSGRDSSFTISSLESEDIGSYYCQQYYNYPWTFGPGTKLEIKRADAAPTVSIFPPSSEQLTSGGASVVCFLNNFYPKDINVKWKIDGSERQNGVLNSWTDQDSKDSTYSMCSTLTLTKDEYERHNSYTCEATHKTSTSPIVKSFNRNESGGGGSGGGGSGGGGSTHDLPKAVVKLEPPWIQVLKEDTVTLTCEGTHNPGNSSTQWFHNGRSIRSQVQASYTFKATVNDSGEYRCQMEQTRLSDPVDLGVISDWLLLQTPQLVFLEGETITLRCHSWRNKLLNRISFFHNEKSVRYHHYSSNFSIPKANHSHSGDYYCKGSLGRTLHQSKPVTITVQGPKSSR

SEQ ID NO: 526 - protein, 557 aa, synthetic construct
QVQLVQSGAEVKKPGSSVKVSCKASGYSITSGYHWGWIRQAPGQGLEWIGAIYHSGSTYYSPSLKSRVTITADKSTSTAYMELSSLRSEDTAVYYCARGPLSYYAFDYWGQGTLVTVSSAKTTAPSVYPLAPVSGDTTGSSVTLGCLVKGYFPEPVTLTWNSGSLSSGVHTCPAVLQSDLYTLSSSVTVTSSTWPSQSITCNVAHPASSTKVDKKIEPKSSDKTHTGGGGSGGGGSGGGGSTHDLPKAVVKLEPPWIQVLKEDTVTLTCEGTHNPGNSSTQWFHNGRSIRSQVQASYTFKATVNDSGEYRCQMEQTRLSDPVDLGVISDWLLLQTPQLVFLEGETITLRCHSWRNKLLNRISFFHNEKSVRYHHYSSNFSIPKANHSHSGDYYCKGSLGRTLHQSKPVTITVQGPKSSRGGGGSGGGGSGGGGSQVQLQESGGGLVQPGGSLRLSCEASGFTFSRFGMTWVRQAPGKGVEWVSGISSLGDSTLYADSVKGRFTISRDNAKNTLYLQMNSLKPEDTAVYYCTIGGSLNPGGQGTQVTVSSGGHHHHHH

SEQ ID NO: 527 - protein, 407 aa, synthetic construct
DIQLTQSPSSLSASVGDRVTITCRASQSVSRYLAWYQQKPGKAPKLLIYDASNRATGIPSRFSGSGSGTDFTLTISSLQPEDFATYYCQQYYRSPITFGQGTKVEIKRADAAPTVSIFPPSSEQLTSGGASVVCFLNNFYPKDINVKWKIDGSERQNGVLNSWTDQDSKDSTYSMCSTLTLTKDEYERHNSYTCEATHKTSTSPIVKSFNRNESGGGGSGGGGSGGGGSTHDLPKAVVKLEPPWIQVLKEDTVTLTCEGTHNPGNSSTQWFHNGRSIRSQVQASYTFKATVNDSGEYRCQMEQTRLSDPVDLGVISDWLLLQTPQLVFLEGETITLRCHSWRNKLLNRISFFHNEKSVRYHHYSSNFSIPKANHSHSGDYYCKGSLGRTLHQSKPVTITVQGPKSSR

SEQ ID NO: 528 - protein, 558 aa, synthetic construct
DVQLVESGGGLVQPGRSLKLSCAASGFIFSYFDMAWVRQAPTKGLEWVASISPDGSIPYYRDSVKGRFTVSRENAKSSLYLQMDSLRSEDTATYYCARRSYGGYSEIDYWGQGVMVTVSSAKTTAPSVYPLAPVSGDTTGSSVTLGCLVKGYFPEPVTLTWNSGSLSSGVHTCPAVLQSDLYTLSSSVTVTSSTWPSQSITCNVAHPASSTKVDKKIEPKSSDKTHTGGGGSGGGGSGGGGSTHDLPKAVVKLEPPWIQVLKEDTVTLTCEGTHNPGNSSTQWFHNGRSIRSQVQASYTFKATVNDSGEYRCQMEQTRLSDPVDLGVISDWLLLQTPQLVFLEGETITLRCHSWRNKLLNRISFFHNEKSVRYHHYSSNFSIPKANHSHSGDYYCKGSLGRTLHQSKPVTITVQGPKSSRGGGGSGGGGSGGGGSQVQLQESGGGLVQPGGSLRLSCEASGFTFSRFGMTWVRQAPGKGVEWVSGISSLGDSTLYADSVKGRFTISRDNAKNTLYLQMNSLKPEDTAVYYCTIGGSLNPGGQGTQVTVSSGGHHHHHH

SEQ ID NO: 529 - protein, 407 aa, synthetic construct
DIQMTQSPASLSASLEEIVTITCQASQDIGNWLAWYHQKPGKSPQLLIYGSTSLADGVPSRFSGSSSGSQYSLKISRLQVEDIGIYYCLQAYGAPWTFGGGTKLELKRADAAPTVSIFPPSSEQLTSGGASVVCFLNNFYPKDINVKWKIDGSERQNGVLNSWTDQDSKDSTYSMCSTLTLTKDEYERHNSYTCEATHKTSTSPIVKSFNRNESGGGGSGGGGSGGGGSTHDLPKAVVKLEPPWIQVLKEDTVTLTCEGTHNPGNSSTQWFHNGRSIRSQVQASYTFKATVNDSGEYRCQMEQTRLSDPVDLGVISDWLLLQTPQLVFLEGETITLRCHSWRNKLLNRISFFHNEKSVRYHHYSSNFSIPKANHSHSGDYYCKGSLGRTLHQSKPVTITVQGPKSSR

SEQ ID NO: 530 - protein, 505 aa, synthetic construct
DVQLVESGGGLVQPGRSLKLSCAASGFIFSYFDMAWVRQAPTKGLEWVASISPDGSIPYYRDSVKGRFTVSRENAKSSLYLQMDSLRSEDTATYYCARRSYGGYSEIDYWGQGVMVTVSSAKTTAPSVYPLAPVSGDTTGSSVTLGCLVKGYFPEPVTLTWNSGSLSSGVHTCPAVLQSDLYTLSSSVTVTSSTWPSQSITCNVAHPASSTKVDKKIEPKSSDKTHTGGGGSGGGGSGGGGSQVQLQESGGGLVQAGGSLRLSCAASGRAVGNYIIGWFRQAPGKEREFVATTTRDGGSTFYADSVKGRFTISRDNAKNTVNLQMNSLEPEDTAVYYCAAKSWSVPLRPTSADFDSWGQGTQVTVSSGGGGSGGGGSGGGGSQVQLQESGGGLVQPGGSLRLSCEASGFTFSRFGMTWVRQAPGKGVEWVSGISSLGDSTLYADSVKGRFTISRDNAKNTLYLQMNSLKPEDTAVYYCTIGGSLNPGGQGTQVTVSSGGHHHHHH

SEQ ID NO: 531 - protein, 354 aa, synthetic construct
DIQMTQSPASLSASLEEIVTITCQASQDIGNWLAWYHQKPGKSPQLLIYGSTSLADGVPSRFSGSSSGSQYSLKISRLQVEDIGIYYCLQAYGAPWTFGGGTKLELKRADAAPTVSIFPPSSEQLTSGGASVVCFLNNFYPKDINVKWKIDGSERQNGVLNSWTDQDSKDSTYSMCSTLTLTKDEYERHNSYTCEATHKTSTSPIVKSFNRNESGGGGSGGGGSGGGGSQVQLQESGGGLVQAGGSLRLSCAASGRAVGNYIIGWFRQAPGKEREFVATTTRDGGSTFYADSVKGRFTISRDNAKNTVNLQMNSLEPEDTAVYYCAAKSWSVPLRPTSADFDSWGQGTQVTVSS

SEQ ID NO: 532 - protein, 562 aa, synthetic construct
EMQLVESGGGLVQPGRSMKLSCAGSGFTISDYGVAWVRQAPKKGLEWVAYISYAGGTTYYRESVKGRFTISRDNAKSTLYLQMDSLRSEDTATYYCTIDGYGGYSGSHWYFDFWGPGTMVTVSSAKTTAPSVYPLAPVSGDTTGSSVTLGCLVKGYFPEPVTLTWNSGSLSSGVHTCPAVLQSDLYTLSSSVTVTSSTWPSQSITCNVAHPASSTKVDKKIEPKSSDKTHTGGGGSGGGGSGGGGSTHDLPKAVVKLEPPWIQVLKEDTVTLTCEGTHNPGNSSTQWFHNGRSIRSQVQASYTFKATVNDSGEYRCQMEQTRLSDPVDLGVISDWLLLQTPQLVFLEGETITLRCHSWRNKLLNRISFFHNEKSVRYHHYSSNFSIPKANHSHSGDYYCKGSLGRTLHQSKPVTITVQGPKSSRGGGGSGGGGSGGGGSQVQLQESGGGLVQPGGSLRLSCEASGFTFSRFGMTWVRQAPGKGVEWVSGISSLGDSTLYADSVKGRFTISRDNAKNTLYLQMNSLKPEDTAVYYCTIGGSLNPGGQGTQVTVSSGGHHHHHH

SEQ ID NO: 533 - protein, 406 aa, synthetic construct
DIQMTQSPSLLSASVGDRVTLNCRTSQNVYKNLAWYQQQLGEAPKLLIYNANSLQAGIPSRFSGSGSGTDFTLTISSLQPEDVATYFCQQYYSGNTFGAGTNLELKRADAAPTVSIFPPSSEQLTSGGASVVCFLNNFYPKDINVKWKIDGSERQNGVLNSWTDQDSKDSTYSMCSTLTLTKDEYERHNSYTCEATHKTSTSPIVKSFNRNESGGGGSGGGGSGGGGSTHDLPKAVVKLEPPWIQVLKEDTVTLTCEGTHNPGNSSTQWFHNGRSIRSQVQASYTFKATVNDSGEYRCQMEQTRLSDPVDLGVISDWLLLQTPQLVFLEGETITLRCHSWRNKLLNRISFFHNEKSVRYHHYSSNFSIPKANHSHSGDYYCKGSLGRTLHQSKPVTITVQGPKSSR

SEQ ID NO: 534 - protein, 555 aa, synthetic construct
EVQLVESGGGLVQPGRSLKLSCAASGFTFSNYDMAWVRQAPTKGLEWVASISPSGGRTYYRDSVKGRFTVSRDNAKSTLYLQMDSLRSEDTATYYCARHDGSYFDYWGQGVMVTVSSAKTTAPSVYPLAPVSGDTTGSSVTLGCLVKGYFPEPVTLTWNSGSLSSGVHTCPAVLQSDLYTLSSSVTVTSSTWPSQSITCNVAHPASSTKVDKKIEPKSSDKTHTGGGGSGGGGSGGGGSTHDLPKAVVKLEPPWIQVLKEDTVTLTCEGTHNPGNSSTQWFHNGRSIRSQVQASYTFKATVNDSGEYRCQMEQTRLSDPVDLGVISDWLLLQTPQLVFLEGETITLRCHSWRNKLLNRISFFHNEKSVRYHHYSSNFSIPKANHSHSGDYYCKGSLGRTLHQSKPVTITVQGPKSSRGGGGSGGGGSGGGGSQVQLQESGGGLVQPGGSLRLSCEASGFTFSRFGMTWVRQAPGKGVEWVSGISSLGDSTLYADSVKGRFTISRDNAKNTLYLQMNSLKPEDTAVYYCTIGGSLNPGGQGTQVTVSSGGHHHHHH

SEQ ID NO: 535 - protein, 406 aa, synthetic construct
DTVLTQSPALAVSPGERVTISCRASESVSTLMHWYQQKPGQQPKLLIYLASHLESGVPARFSGSGSGTDFTLTIDPVEADDTATYYCQESWNDPWTFGGGTKLELKRADAAPTVSIFPPSSEQLTSGGASVVCFLNNFYPKDINVKWKIDGSERQNGVLNSWTDQDSKDSTYSMCSTLTLTKDEYERHNSYTCEATHKTSTSPIVKSFNRNESGGGGSGGGGSGGGGSTHDLPKAVVKLEPPWIQVLKEDTVTLTCEGTHNPGNSSTQWFHNGRSIRSQVQASYTFKATVNDSGEYRCQMEQTRLSDPVDLGVISDWLLLQTPQLVFLEGETITLRCHSWRNKLLNRISFFHNEKSVRYHHYSSNFSIPKANHSHSGDYYCKGSLGRTLHQSKPVTITVQGPKSSR

SEQ ID NO: 536 - protein, 502 aa, synthetic construct
EVQLVESGGGLVQPGRSLKLSCAASGFTFSNYDMAWVRQAPTKGLEWVASISPSGGRTYYRDSVKGRFTVSRDNAKSTLYLQMDSLRSEDTATYYCARHDGSYFDYWGQGVMVTVSSAKTTAPSVYPLAPVSGDTTGSSVTLGCLVKGYFPEPVTLTWNSGSLSSGVHTCPAVLQSDLYTLSSSVTVTSSTWPSQSITCNVAHPASSTKVDKKIEPKSSDKTHTGGGGSGGGGSGGGGSQVQLQESGGGLVQAGGSLRLSCAASGRAVGNYIIGWFRQAPGKEREFVATTTRDGGSTFYADSVKGRFTISRDNAKNTVNLQMNSLEPEDTAVYYCAAKSWSVPLRPTSADFDSWGQGTQVTVSSGGGGSGGGGSGGGGSQVQLQESGGGLVQPGGSLRLSCEASGFTFSRFGMTWVRQAPGKGVEWVSGISSLGDSTLYADSVKGRFTISRDNAKNTLYLQMNSLKPEDTAVYYCTIGGSLNPGGQGTQVTVSSGGHHHHHH

SEQ ID NO: 537 - protein, 353 aa, synthetic construct
DTVLTQSPALAVSPGERVTISCRASESVSTLMHWYQQKPGQQPKLLIYLASHLESGVPARFSGSGSGTDFTLTIDPVEADDTATYYCQESWNDPWTFGGGTKLELKRADAAPTVSIFPPSSEQLTSGGASVVCFLNNFYPKDINVKWKIDGSERQNGVLNSWTDQDSKDSTYSMCSTLTLTKDEYERHNSYTCEATHKTSTSPIVKSFNRNESGGGGSGGGGSGGGGSQVQLQESGGGLVQAGGSLRLSCAASGRAVGNYIIGWFRQAPGKEREFVATTTRDGGSTFYADSVKGRFTISRDNAKNTVNLQMNSLEPEDTAVYYCAAKSWSVPLRPTSADFDSWGQGTQVTVSS

SEQ ID NO: 538 - protein, 554 aa, synthetic construct
EVQVVESDGGLVQPGRSLKLPCAASGFTFSDYYMAWVRQAPTKGLEWVASISYDGSSTYYRDSVKGRFTISRDNAKSTLYLQMDSLRSEDTATYYCGRHSSYFDYWGQGVMVTVSSAKTTAPSVYPLAPVSGDTTGSSVTLGCLVKGYFPEPVTLTWNSGSLSSGVHTCPAVLQSDLYTLSSSVTVTSSTWPSQSITCNVAHPASSTKVDKKIEPKSSDKTHTGGGGSGGGGSGGGGSTHDLPKAVVKLEPPWIQVLKEDTVTLTCEGTHNPGNSSTQWFHNGRSIRSQVQASYTFKATVNDSGEYRCQMEQTRLSDPVDLGVISDWLLLQTPQLVFLEGETITLRCHSWRNKLLNRISFFHNEKSVRYHHYSSNFSIPKANHSHSGDYYCKGSLGRTLHQSKPVTITVQGPKSSRGGGGSGGGGSGGGGSQVQLQESGGGLVQPGGSLRLSCEASGFTFSRFGMTWVRQAPGKGVEWVSGISSLGDSTLYADSVKGRFTISRDNAKNTLYLQMNSLKPEDTAVYYCTIGGSLNPGGQGTQVTVSSGGHHHHHH

SEQ ID NO: 539 - protein, 406 aa, synthetic construct
DIELTQSPALAVSPGERVTISCRASDSVSTLMHWYQQKPGQQPKLLIYLASHLESGVPARFSGSGSGTDFTLTIDPVEADDTATYYCQQSWNDPWTFGGGTKLELKRADAAPTVSIFPPSSEQLTSGGASVVCFLNNFYPKDINVKWKIDGSERQNGVLNSWTDQDSKDSTYSMCSTLTLTKDEYERHNSYTCEATHKTSTSPIVKSFNRNESGGGGSGGGGSGGGGSTHDLPKAVVKLEPPWIQVLKEDTVTLTCEGTHNPGNSSTQWFHNGRSIRSQVQASYTFKATVNDSGEYRCQMEQTRLSDPVDLGVISDWLLLQTPQLVFLEGETITLRCHSWRNKLLNRISFFHNEKSVRYHHYSSNFSIPKANHSHSGDYYCKGSLGRTLHQSKPVTITVQGPKSSR

SEQ ID NO: 540 - protein, 631 aa, synthetic construct
THDLPKAVVKLEPPWIQVLKEDTVTLTCEGTHNPGNSSTQWFHNGRSIRSQVQASYTFKATVNDSGEYRCQMEQTRLSDPVDLGVISDWLLLQTPQLVFLEGETITLRCHSWRNKLLNRISFFHNEKSVRYHHYSSNFSIPKANHSHSGDYYCKGSLGRTLHQSKPVTITVQGPKSSRGGGGSGGGGSGGGGSDIQMTQSPSSLSASVGDRVTITCRASQPIGHTLGWYQQKPGKAPKLLIYWASDLIRGVPSRFSGSGSGTDFTLTISSLQPEDFATYYCQQMLRTPFMFGQGTKVEIKGGGGSGGGGSGGGGSTHDLPKAVVKLEPPWIQVLKEDTVTLTCEGTHNPGNSSTQWFHNGRSIRSQVQASYTFKATVNDSGEYRCQMEQTRLSDPVDLGVISDWLLLQTPQLVFLEGETITLRCHSWRNKLLNRISFFHNEKSVRYHHYSSNFSIPKANHSHSGDYYCKGSLGRTLHQSKPVTITVQGPKSSRGGGGSGGGGSGGGGSQVQLQESGGGLVQPGGSLRLSCEASGFTFSRFGMTWVRQAPGKGVEWVSGISSLGDSTLYADSVKGRFTISRDNAKNTLYLQMNSLKPEDTAVYYCTIGGSLNPGGQGTQVTVSSGGHHHHHH

SEQ ID NO: 541 - protein, 120 aa, synthetic construct
DVQLVESGGGLVQPGRSLKLSCAASGFIFSYFDMAWVRQAPTKGLEWVASISPDGSIPYYRDSVKGRFTVSRENAKSSLYLQMDSLRSEDTATYYCARRSYGGYSEIDYWGQGVMVTVSS

SEQ ID NO: 542 - protein, 107 aa, synthetic construct
DIQMTQSPASLSASLEEIVTITCQASQDIGNWLAWYHQKPGKSPQLLIYGSTSLADGVPSRFSGSSSGSQYSLKISRLQVEDIGIYYCLQAYGAPWTFGGGTKLELK

SEQ ID NO: 543 - protein, 124 aa, synthetic construct
EMQLVESGGGLVQPGRSMKLSCAGSGFTISDYGVAWVRQAPKKGLEWVAYISYAGGTTYYRESVKGRFTISRDNAKSTLYLQMDSLRSEDTATYYCTIDGYGGYSGSHWYFDFWGPGTMVTVSS

SEQ ID NO: 544 - protein, 106 aa, synthetic construct
DIQMTQSPSLLSASVGDRVTLNCRTSQNVYKNLAWYQQQLGEAPKLLIYNANSLQAGIPSRFSGSGSGTDFTLTISSLQPEDVATYFCQQYYSGNTFGAGTNLELK

SEQ ID NO: 545 - protein, 117 aa, synthetic construct
EVQLVESGGGLVQPGRSLKLSCAASGFTFSNYDMAWVRQAPTKGLEWVASISPSGGRTYYRDSVKGRFTVSRDNAKSTLYLQMDSLRSEDTATYYCARHDGSYFDYWGQGVMVTVSS

SEQ ID NO: 546 - protein, 106 aa, synthetic construct
DTVLTQSPALAVSPGERVTISCRASESVSTLMHWYQQKPGQQPKLLIYLASHLESGVPARFSGSGSGTDFTLTIDPVEADDTATYYCQESWNDPWTFGGGTKLELK

SEQ ID NO: 547 - protein, 116 aa, synthetic construct
EVQVVESDGGLVQPGRSLKLPCAASGFTFSDYYMAWVRQAPTKGLEWVASISYDGSSTYYRDSVKGRFTISRDNAKSTLYLQMDSLRSEDTATYYCGRHSSYFDYWGQGVMVTVSS

SEQ ID NO: 548 - protein, 106 aa, synthetic construct
DIELTQSPALAVSPGERVTISCRASDSVSTLMHWYQQKPGQQPKLLIYLASHLESGVPARFSGSGSGTDFTLTIDPVEADDTATYYCQQSWNDPWTFGGGTKLELK

SEQ ID NO: 549 - protein, 120 aa, synthetic construct
QVQLVQSGGGLVQPGGSLRLSCAASGFTFSSYAMHWVRQAPGKGLEWVTVISPDGHNTYYADSVKGRFTISRDNSKNTLYLQMNSLRAEDTAVYYCARASVGATGPFDIWGQGTLVTVSS

SEQ ID NO: 550 - protein, 109 aa, synthetic construct
SSELTQPPSVSVAPGQTVTITCQGDSLRSYYASWYQQKPGTAPKLLIYGENNRPSGVPDRFSGSSSGTSASLTITGAQAEDEADYYCNSRDSSGTHLTVFGGGTKLTVL

SEQ ID NO: 551 - protein, 444 aa, synthetic construct
QVQLVQSGGGLVQPGGSLRLSCAASGFTFSSYAMHWVRQAPGKGLEWVTVISPDGHNTYYADSVKGRFTISRDNSKNTLYLQMNSLRAEDTAVYYCARASVGATGPFDIWGQGTLVTVSSAKTTPPSVYPLAPGSAAQTNSMVTLGCLVKGYFPEPVTVTWNSGSLSSGVHTFPAVLQSDLYTLSSSVTVPSSPRPSETVTCNVAHPASSTKVDKKIVPRDCGCKPCICTVPEVSSVFIFPPKPKDVLTITLTPKVTCVVVDISKDDPEVQFSWFVDDVEVHTAQTQPREEQFNSTFRSVSELPIMHQDWLNGKEFKCRVNSAAFPAPIEKTISKTKGRPKAPQVYTIPPPKEQMAKDKVSLTCMITDFFPEDITVEWQWNGQPAENYKNTQPIMNTNGSYFVYSKLNVQKSNWEAGNTFTCSVLHEGLHNHHTEKSLSHSPGK

SEQ ID NO: 552 - protein, 215 aa, synthetic construct
SSELTQPPSVSVAPGQTVTITCQGDSLRSYYASWYQQKPGTAPKLLIYGENNRPSGVPDRFSGSSSGTSASLTITGAQAEDEADYYCNSRDSSGTHLTVFGGGTKLTVLGQPKSSPSVTLFPPSSEELETNKATLVCTITDFYPGVVTVDWKVDGTPVTQGMETTQPSKQSNNKYMASSYLTLTARAWERHSSYSCQVTHEGHTVEKSLSRADCS

SEQ ID NO: 553 - protein, 116 aa, synthetic construct
EVQLQQSGAELVRPGTSVKLSCKVSGDTITFYYMHFVKQRPGQGLEWIGRIDPEDESTKYSEKFKNKATLTADTSSNTAYLKLSSLTSEDTATYFCIYGGYYFDYWGQGVMVTVSS

SEQ ID NO: 554 - protein, 107 aa, synthetic construct
DIQMTQSPASLSTSLGETVTIQCQASEDIYSGLAWYQQKPGKSPQLLIYGASDLQDGVPSRFSGSGSGTQYSLKITSMQTEDEGVYFCQQGLTYPRTFGGGTKLELK

SEQ ID NO: 555 - protein, 446 aa, synthetic construct
EVQLQQSGAELVRPGTSVKLSCKVSGDTITFYYMHFVKQRPGQGLEWIGRIDPEDESTKYSEKFKNKATLTADTSSNTAYLKLSSLTSEDTATYFCIYGGYYFDYWGQGVMVTVSSAKTTAPSVYPLAPVCGDTTGSSVTLGCLVKGYFPEPVTLTWNSGSLSSGVHTFPAVLQSDLYTLSSSVTVTSSTWPSQSITCNVAHPASSTKVDKKIEPRGPTIKPCPPCKCPAPNLLGGPSVFIFPPKIKDVLMISLSPIVTCVVVDVSEDDPDVQISWFVNNVEVHTAQTQTHREDYNSTLRVVSALPIQHQDWMSGKEFKCKVNNKDLPAPIERTISKPKGSVRAPQVYVLPPPEEEMTKKQVTLTCMVTDFMPEDIYVEWTNNGKTELNYKNTEPVLDSDGSYFMYSKLRVEKKNWVERNSYSCSVVHEGLHNHHTTKSFSRTPGK

SEQ ID NO: 556 - protein, 214 aa, synthetic construct
DIQMTQSPASLSTSLGETVTIQCQASEDIYSGLAWYQQKPGKSPQLLIYGASDLQDGVPSRFSGSGSGTQYSLKITSMQTEDEGVYFCQQGLTYPRTFGGGTKLELKRADAAPTVSIFPPSSEQLTSGGASVVCFLNNFYPKDINVKWKIDGSERQNGVLNSWTDQDSKDSTYSMSSTLTLTKDEYERHNSYTCEATHKTSTSPIVKSFNRNEC

SEQ ID NO: 557 - protein, 13 aa, synthetic construct
ASTKGPSVFPLAS

SEQ ID NO: 558 - protein, 30 aa, synthetic construct
EVQLVESGGGLVQPGNSLRLSCAASGFTFS

SEQ ID NO: 559 - protein, 5 aa, synthetic construct
SFGMS

SEQ ID NO: 560 - protein, 14 aa, synthetic construct
WVRQAPGKGLEWVS

SEQ ID NO: 561 - protein, 17 aa, synthetic construct
SISGSGSDTLYADSVKG

SEQ ID NO: 562 - protein, 32 aa, synthetic construct
RFTISRDNAKTTLYLQMNSLRPEDTAVYYCTI

SEQ ID NO: 563 - protein, 6 aa, synthetic construct
GGSLSR

SEQ ID NO: 564 - protein, 11 aa, synthetic construct
SSQGTLVTVSS

SEQ ID NO: 565 - protein, 30 aa, synthetic construct
AVQLVESGGGLVQPGNSLRLSCAASGFTFR

SEQ ID NO: 566 - protein, 14 aa, synthetic construct
WVRQAPGKEPEWVS

SEQ ID NO: 567 - protein, 32 aa, synthetic construct
RFTISRDNAKTTLYLQMNSLKPEDTAVYYCTI

SEQ ID NO: 568 - protein, 11 aa, synthetic construct
SSQGTQVTVSS

SEQ ID NO: 569 - protein, 30 aa, synthetic construct
QVQLQESGGGLVQAGDSLRISCRASGLTVN

SEQ ID NO: 570 - protein, 5 aa, synthetic construct
DLYMG

SEQ ID NO: 571 - protein, 14 aa, synthetic construct
WFRQAPGKEREFVG

SEQ ID NO: 572 - protein, 19 aa, synthetic construct
RVTPGDNTDYTYYVDSVKG

SEQ ID NO: 573 - protein, 32 aa, synthetic construct
RFTISRDSAKNTVYLQMNSLKLEDTAVYLCAG

SEQ ID NO: 574 - protein, 10 aa, synthetic construct
RRFGSSEWDY

SEQ ID NO: 575 - protein, 11 aa, synthetic construct
WGQGTQVTVSS

SEQ ID NO: 576 - protein, 30 aa, synthetic construct
QVQLVESGGGLVQPGGSLRLSCAASGLTVN

SEQ ID NO: 577 - protein, 14 aa, synthetic construct
WFRQAPGQGLEAVA

SEQ ID NO: 578 - protein, 19 aa, synthetic construct
RVTPGDNTDYTYYADSVKG

SEQ ID NO: 579 - protein, 32 aa, synthetic construct
RFTISRDNSKNTLYLQMNSLRAEDTAVYYCAG

SEQ ID NO: 580 - protein, 11 aa, synthetic construct
WGQGTLVTVSS

SEQ ID NO: 581 - protein, 30 aa, synthetic construct
QVQLQESGGGLVQAGGSLRLSCAVSGNTLS

SEQ ID NO: 582 - protein, 5 aa, synthetic construct
RYAMG

SEQ ID NO: 583 - protein, 14 aa, synthetic construct
WFRQTPGNEREFVA

SEQ ID NO: 584 - protein, 17 aa, synthetic construct
AIRWNNGATYYADSVEG

SEQ ID NO: 585 - protein, 32 aa, synthetic construct
RFTISRDSGKNTVYLQMNNLKPEDTAVYYCAG

SEQ ID NO: 586 - protein, 20 aa, synthetic construct
RFLGYASSNAYHEALYNYDY

SEQ ID NO: 587 - protein, 30 aa, synthetic construct
QVQLVESGGGLVQPGGSLRLSCAASGNTLS

SEQ ID NO: 588 - protein, 17 aa, synthetic construct
AIRWNNGATYYADSVKG

SEQ ID NO: 589 - protein, 30 aa, synthetic construct
EVQLQQSGAELVKPGASVKLSCTGSGFNIK

SEQ ID NO: 590 - protein, 5 aa, synthetic construct
DTYIY

SEQ ID NO: 591 - protein, 14 aa, synthetic construct
WLKQRPEQGLEWIG

SEQ ID NO: 592 - protein, 17 aa, synthetic construct
RIDPANGDTEYDPKFQG

SEQ ID NO: 593 - protein, 32 aa, synthetic construct
KATIRADTSSNTAYLQLSSLTSDDTVVYYCAR

SEQ ID NO: 594 - protein, 11 aa, synthetic construct
KYGNNRAWFAF

SEQ ID NO: 595 - protein, 11 aa, synthetic construct
WGQGTLVTVSA

SEQ ID NO: 596 - protein, 23 aa, synthetic construct
QIVMTQTPKFLLVSAGDRVTITC

SEQ ID NO: 597 - protein, 11 aa, synthetic construct
KASQSVSDDVA

SEQ ID NO: 598 - protein, 15 aa, synthetic construct
WYQQKPGQSPKLLIY

SEQ ID NO: 599 - protein, 7 aa, synthetic construct
FASYRYT

SEQ ID NO: 600 - protein, 32 aa, synthetic construct
GVPDRFTGSGYGTDFTFTISSVQADDLAVYFC

SEQ ID NO: 601 - protein, 9 aa, synthetic construct
QQDYSSPLT

SEQ ID NO: 602 - protein, 10 aa, synthetic construct
FGAGTKVELK

SEQ ID NO: 603 - protein, 23 aa, synthetic construct
QIVMTQTPKSLLVSAGDRVTITC

SEQ ID NO: 604 - protein, 32 aa, synthetic construct
GVPDRFTGSGYGTDFTLTISSVQADDAAVYYC

SEQ ID NO: 605 - protein, 30 aa, synthetic construct
QVQLVQSGAEVKKPGASVKVSCKASGFNIK

SEQ ID NO: 606 - protein, 14 aa, synthetic construct
WVRQAPGQGLEWMG

SEQ ID NO: 607 - protein, 17 aa, synthetic construct
RIDPANGDTNYAQKFQG

SEQ ID NO: 608 - protein, 32 aa, synthetic construct
RVTMTRDTSISTAYMELSSLRSEDTAVYYCAR

SEQ ID NO: 609 - protein, 23 aa, synthetic construct
DIVMTQSPDSLAVSLGERATINC

SEQ ID NO: 610 - protein, 15 aa, synthetic construct
WYQQKPGQPPKLLIY

SEQ ID NO: 611 - protein, 32 aa, synthetic construct
GVPDRFSGSGSGTDFTLTISSLQAEDVAVYYC

SEQ ID NO: 612 - protein, 10 aa, synthetic construct
FGQGTKVEIK

SEQ ID NO: 613 - protein, 30 aa, synthetic construct
QVQLQQPGAELVKPGASVKMSCKASGYTFT

SEQ ID NO: 614 - protein, 5 aa, synthetic construct
NYWIN

SEQ ID NO: 615 - protein, 14 aa, synthetic construct
WVKQRPGQGLEWIG

SEQ ID NO: 616 - protein, 17 aa, synthetic construct
DIYPGGGITNYNEKFKT

SEQ ID NO: 617 - protein, 32 aa, synthetic construct
KATLTLDTSSSTVYMQLSSLTSEDSAVYYCSR

SEQ ID NO: 618 - protein, 8 aa, synthetic construct
SYGKYFDY

SEQ ID NO: 619 - protein, 11 aa, synthetic construct
WGQGTTLIVSS

SEQ ID NO: 620 - protein, 23 aa, synthetic construct
DIKMTQSPSSMYASVGERVTITC

SEQ ID NO: 621 - protein, 11 aa, synthetic construct
KASQDIKSYLT

SEQ ID NO: 622 - protein, 15 aa, synthetic construct
WYQKKPWKSPRTLIF

SEQ ID NO: 623 - protein, 7 aa, synthetic construct
YSTRLAD

SEQ ID NO: 624 - protein, 32 aa, synthetic construct
GVPSRFSGSGSGQDFSLTISSLESDDTATYYC

SEQ ID NO: 625 - protein, 9 aa, synthetic construct
LQHDESPFT

SEQ ID NO: 626 - protein, 10 aa, synthetic construct
FGGGTKLEIK

SEQ ID NO: 627 - protein, 30 aa, synthetic construct
QVQLVQPGAEVVKPGASVKMSCKASGYTFT

SEQ ID NO: 628 - protein, 32 aa, synthetic construct
KATLTLDTSTSTVYMELSSLRSEDTAVYYCSR

SEQ ID NO: 629 - protein, 11 aa, synthetic construct
WGQGTLLTVSS

SEQ ID NO: 630 - protein, 23 aa, synthetic construct
DIQMTQSPSSMYASVGERVTITC

SEQ ID NO: 631 - protein, 15 aa, synthetic construct
WYQKKPGKSPKTLIF

SEQ ID NO: 632 - protein, 32 aa, synthetic construct
GVPSRFSGSGSGQDFSLTISSLEPEDTATYYC

SEQ ID NO: 633 - protein, 30 aa, synthetic construct
QVQLVQSGAEVKKPGASVKVSCKASGYTFT

SEQ ID NO: 634 - protein, 17 aa, synthetic construct
DIYPGGGITNYAQKFQG

SEQ ID NO: 635 - protein, 23 aa, synthetic construct
DIQMTQSPSSLSASVGDRVTITC

SEQ ID NO: 636 - protein, 15 aa, synthetic construct
WYQQKPGKAPKLLIY

SEQ ID NO: 637 - protein, 32 aa, synthetic construct
GVPSRFSGSGSGTDFTLTISSLQPEDFATYYC

SEQ ID NO: 638 - protein, 10 aa, synthetic construct
FGGGTKVEIK

SEQ ID NO: 639 - protein, 14 aa, synthetic construct
WVRQAPGQGLEWIG

SEQ ID NO: 640 - protein, 32 aa, synthetic construct
KATLTLDTSTSTVYMELSSLTSEDTAVYYCSR

SEQ ID NO: 641 - protein, 15 aa, synthetic construct
WYQQKPGKAPKTLIF

SEQ ID NO: 642 - protein, 32 aa, synthetic construct
GVPSRFSGSGSGQDFTLTISSLQPEDFATYYC

SEQ ID NO: 643 - protein, 30 aa, synthetic construct
QVQLQESGGGLVQAGGSLRLSCAASGRAVG

SEQ ID NO: 644 - protein, 5 aa, synthetic construct
NYIIG

SEQ ID NO: 645 - protein, 14 aa, synthetic construct
WFRQAPGKEREFVA

SEQ ID NO: 646 - protein, 17 aa, synthetic construct
TTTRDGGSTFYADSVKG

SEQ ID NO: 647 - protein, 32 aa, synthetic construct
RFTISRDNAKNTVNLQMNSLEPEDTAVYYCAA

SEQ ID NO: 648 - protein, 16 aa, synthetic construct
KSWSVPLRPTSADFDS

SEQ ID NO: 649 - protein, 30 aa, synthetic construct
QVQLVESGGGLVQPGGSLRLSCAASGRAVG

SEQ ID NO: 650 - protein, 17 aa, synthetic construct
TTTRDGGSTYYADSVKG

SEQ ID NO: 651 - protein, 32 aa, synthetic construct
RFTISRDNSKNTLYLQMNSLRAEDTAVYYCAA

SEQ ID NO: 652 - protein, 30 aa, synthetic construct
QVQLQESGGGLVQPGESLRLSCAASGIAFE

SEQ ID NO: 653 - protein, 5 aa, synthetic construct
VFNMG

SEQ ID NO: 654 - protein, 14 aa, synthetic construct
WYRQAPGKQRELVA

SEQ ID NO: 655 - protein, 16 aa, synthetic construct
TITNSGATNYADSVKG

SEQ ID NO: 656 - protein, 32 aa, synthetic construct
RFTISRDNAKDTLYLQMNSLKPEDTAVYYCNA

SEQ ID NO: 657 - protein, 7 aa, synthetic construct
QNSWRNI

SEQ ID NO: 658 - protein, 30 aa, synthetic construct
EVQLVESGGGLVQPGGSLRLSCAASGYSFT

SEQ ID NO: 659 - protein, 5 aa, synthetic construct
GYTMN

SEQ ID NO: 660 - protein, 14 aa, synthetic construct
WVRQAPGKGLEWVA

SEQ ID NO: 661 - protein, 17 aa, synthetic construct
LINPTKGVSTYNQKFKD

SEQ ID NO: 662 - protein, 32 aa, synthetic construct
RFTISVDKSKNTAYLQMNSLRAEDTAVYYCAR

SEQ ID NO: 663 - protein, 13 aa, synthetic construct
SGYYGDSDWYFDV

SEQ ID NO: 664 - protein, 11 aa, synthetic construct
RASQDIRNYLN

SEQ ID NO: 665 - protein, 7 aa, synthetic construct
YTSRLES

SEQ ID NO: 666 - protein, 32 aa, synthetic construct
GVPSRFSGSGSGTDYTLTISSLQPEDFATYYC

SEQ ID NO: 667 - protein, 9 aa, synthetic construct
QQGNTLPWT

SEQ ID NO: 668 - protein, 30 aa, synthetic construct
QVQLQQSGAELARPGASVKMSCKTSGYTFT

SEQ ID NO: 669 - protein, 5 aa, synthetic construct
RYTMH

SEQ ID NO: 670 - protein, 17 aa, synthetic construct
YINPSRGYTNYNQKFKD

SEQ ID NO: 671 - protein, 32 aa, synthetic construct
KATLTTDKSSSTAYMQLSSLTSEDSAVYYCAR

SEQ ID NO: 672 - protein, 10 aa, synthetic construct
YYDDHYSLDY

SEQ ID NO: 673 - protein, 11 aa, synthetic construct
WGQGTTLTVSS

SEQ ID NO: 674 - protein, 23 aa, synthetic construct
QIVLTQSPSSLSASLGEKVTMTC

SEQ ID NO: 675 - protein, 10 aa, synthetic construct
RASSSVSYMN

SEQ ID NO: 676 - protein, 15 aa, synthetic construct
WYQQKPGTSPKRWIY

SEQ ID NO: 677 - protein, 7 aa, synthetic construct
DTSKVAS

SEQ ID NO: 678 - protein, 32 aa, synthetic construct
GVPDRFSGSGSGTSYSLTISSMEAEDAATYYC

SEQ ID NO: 679 - protein, 9 aa, synthetic construct
QQWSSNPLT

SEQ ID NO: 680 - protein, 10 aa, synthetic construct
FGAGTKLELK

SEQ ID NO: 681 - protein, 10 aa, synthetic construct
YYDDNYSLDY

SEQ ID NO: 682 - protein, 5 aa, synthetic construct
RYYMH

SEQ ID NO: 683 - protein, 17 aa, synthetic construct
YINPSRGYTNYAQKFQG

SEQ ID NO: 684 - protein, 30 aa, synthetic construct
EVQLVESGGGLVQPGGSLKLSCAASGFTFN

SEQ ID NO: 685 - protein, 5 aa, synthetic construct
KYAMN

SEQ ID NO: 686 - protein, 19 aa, synthetic construct
RIRSKYNNYATYYADSVKD

SEQ ID NO: 687 - protein, 32 aa, synthetic construct
RFTISRDDSKNTAYLQMNNLKTEDTAVYYCVR

SEQ ID NO: 688 - protein, 14 aa, synthetic construct
HGNFGNSYISYWAY

SEQ ID NO: 689 - protein, 22 aa, synthetic construct
QTVVTQEPSLTVSPGGTVTLTC

SEQ ID NO: 690 - protein, 14 aa, synthetic construct
GSSTGAVTSGNYPN

SEQ ID NO: 691 - protein, 15 aa, synthetic construct
WVQQKPGQAPRGLIG

SEQ ID NO: 692 - protein, 7 aa, synthetic construct
GTKFLAP

SEQ ID NO: 693 - protein, 32 aa, synthetic construct
GTPARFSGSLLGGKAALTLSGVQPEDEAEYYC

SEQ ID NO: 694 - protein, 9 aa, synthetic construct
VLWYSNRWV

SEQ ID NO: 695 - protein, 10 aa, synthetic construct
FGGGTKLTVL

SEQ ID NO: 696 - protein, 30 aa, synthetic construct
QVQLVQSGAEVKKPGASVKVSCKASGYTFI

SEQ ID NO: 697 - protein, 5 aa, synthetic construct
SYTMH

SEQ ID NO: 698 - protein, 17 aa, synthetic construct
YINPRSGYTHYNQKLKD

SEQ ID NO: 699 - protein, 32 aa, synthetic construct
KATLTADKSASTAYMELSSLRSEDTAVYYCAR

SEQ ID NO: 700 - protein, 11 aa, synthetic construct
SAYYDYDGFAY

SEQ ID NO: 701 - protein, 10 aa, synthetic construct
SASSSVSYMN

SEQ ID NO: 702 - protein, 15 aa, synthetic construct
WYQQKPGKAPKRLIY

SEQ ID NO: 703 - protein, 7 aa, synthetic construct
DTSKLAS

SEQ ID NO: 704 - protein, 9 aa, synthetic construct
QQWSSNPPT

SEQ ID NO: 705 - protein, 30 aa, synthetic construct
EVQLVESGGGLVKPGGSLRLSCAASGFTFS

SEQ ID NO: 706 - protein, 5 aa, synthetic construct
SYGMF

SEQ ID NO: 707 - protein, 17 aa, synthetic construct
TISRYSRYIYYPDSVKG

SEQ ID NO: 708 - protein, 32 aa, synthetic construct
RFTISRDNAKNSLYLQMNSLRAEDTAVYYCAR

SEQ ID NO: 709 - protein, 10 aa, synthetic construct
RPLYGSSPDY

SEQ ID NO: 710 - protein, 23 aa, synthetic construct
EIVLTQSPATLSLSPGERATLSC

SEQ ID NO: 711 - protein, 10 aa, synthetic construct
SASSSVTYVH

SEQ ID NO: 712 - protein, 15 aa, synthetic construct
WYQQKPGQAPRLLIY

SEQ ID NO: 713 - protein, 32 aa, synthetic construct
GIPARFSGSGSGTDFTLTISSLEPEDFAVYYC

SEQ ID NO: 714 - protein, 9 aa, synthetic construct
FQGSGYPLT

SEQ ID NO: 715 - protein, 10 aa, synthetic construct
FGSGTKLEIK

SEQ ID NO: 716 - protein, 30 aa, synthetic construct
EVQLLESGGGLVQPGGSLRLSCAASGFTFS

SEQ ID NO: 717 - protein, 5 aa, synthetic construct
SFPMA

SEQ ID NO: 718 - protein, 17 aa, synthetic construct
TISTSGGRTYYRDSVKG

SEQ ID NO: 719 - protein, 32 aa, synthetic construct
RFTISRDNSKNTLYLQMNSLRAEDTAVYYCAK

SEQ ID NO: 720 - protein, 10 aa, synthetic construct
FRQYSGGFDY

SEQ ID NO: 721 - protein, 22 aa, synthetic construct
DFMLTQPHSVSESPGKTVIISC

SEQ ID NO: 722 - protein, 13 aa, synthetic construct
TLSSGNIENNYVH

SEQ ID NO: 723 - protein, 15 aa, synthetic construct
WYQQRPGRAPTTVIF

SEQ ID NO: 724 - protein, 7 aa, synthetic construct
DDDKRPD

SEQ ID NO: 725 - protein, 34 aa, synthetic construct
GVPDRFSGSIDRSSNSASLTISGLQTEDEADYYC

SEQ ID NO: 726 - protein, 9 aa, synthetic construct
HSYVSSFNV

SEQ ID NO: 727 - protein, 30 aa, synthetic construct
QVQLQQSAAELARPGASVKMSCKASGYTFT

SEQ ID NO: 728 - protein, 5 aa, synthetic construct
RYTMQ

SEQ ID NO: 729 - protein, 17 aa, synthetic construct
YINPSSGYIGYSQKFKD

SEQ ID NO: 730 - protein, 32 aa, synthetic construct
KTTLTADKSSSTAYMQLSSLTSEDSAVYYCAR

SEQ ID NO: 731 - protein, 14 aa, synthetic construct
SKVYYDYDVYSMDY

SEQ ID NO: 732 - protein, 11 aa, synthetic construct
WGQGTSVTVSS

SEQ ID NO: 733 - protein, 23 aa, synthetic construct
QIILTQSPAIMSASPGEKVTMTC

SEQ ID NO: 734 - protein, 10 aa, synthetic construct
SASSSVSYMH

SEQ ID NO: 735 - protein, 15 aa, synthetic construct
WYQQKSGTSPKRWIY

SEQ ID NO: 736 - protein, 32 aa, synthetic construct
GVPARFSGSGSGTSYSLTISSMEAEDAATYYC

SEQ ID NO: 737 - protein, 30 aa, synthetic construct
EVQLVESGGGLVQPGGSLRLSCAASGFPLS

SEQ ID NO: 738 - protein, 5 aa, synthetic construct
SYAMI

SEQ ID NO: 739 - protein, 14 aa, synthetic construct
WVRQAPGKGLEWIG

SEQ ID NO: 740 - protein, 16 aa, synthetic construct
MILRAGNIYYASWVKG

SEQ ID NO: 741 - protein, 32 aa, synthetic construct
RFTISRDNSKNTVYLQMNSLRAEDTAVYYCAR

SEQ ID NO: 742 - protein, 15 aa, synthetic construct
RHYNREGYPIGIGDL

SEQ ID NO: 743 - protein, 13 aa, synthetic construct
QSSESVYNNKRLS

SEQ ID NO: 744 - protein, 7 aa, synthetic construct
TASSLAS

SEQ ID NO: 745 - protein, 13 aa, synthetic construct
QGEFTCSNADCFT

SEQ ID NO: 746 - protein, 10 aa, synthetic construct
FGQGTKLTVL

SEQ ID NO: 747 - protein, 30 aa, synthetic construct
QVQLQESGPELVKPGASVKMSCKASGYKFS

SEQ ID NO: 748 - protein, 5 aa, synthetic construct
SSVMH

SEQ ID NO: 749 - protein, 14 aa, synthetic construct
WVKQKAGQGLEWIG

SEQ ID NO: 750 - protein, 17 aa, synthetic construct
YINPYNDVTKYNGKFKG

SEQ ID NO: 751 - protein, 32 aa, synthetic construct
KATLTSDKSSSTAYMELSSLTSEDSAVYYCAR

SEQ ID NO: 752 - protein, 11 aa, synthetic construct
SAYYDYDGIAY

SEQ ID NO: 753 - protein, 11 aa, synthetic construct
WGQGTTVTVSS

SEQ ID NO: 754 - protein, 23 aa, synthetic construct
DIQLTQSPAIMSASPGEKVTMTC

SEQ ID NO: 755 - protein, 32 aa, synthetic construct
GVPARFTGSGSGTSYSLTISNMEAEDAATYYC

SEQ ID NO: 756 - protein, 30 aa, synthetic construct
QVQLVQSGAEVKKPGASVKVSCKASGYKFT

SEQ ID NO: 757 - protein, 5 aa, synthetic construct
SYVMH

SEQ ID NO: 758 - protein, 17 aa, synthetic construct
YINPYNDVTKYNEKFKG

SEQ ID NO: 759 - protein, 32 aa, synthetic construct
RVTITADKSTSTAYLQMNSLRSEDTAVHYCAR

SEQ ID NO: 760 - protein, 11 aa, synthetic construct
GSYYDYDGFVY

SEQ ID NO: 761 - protein, 10 aa, synthetic construct
SATSSVSYMH

SEQ ID NO: 762 - protein, 15 aa, synthetic construct
WYQQKPGKAPKRWIY

SEQ ID NO: 763 - protein, 32 aa, synthetic construct
GVPSRFSGSGSGTEFTLTISSLQPEDFATYYC

SEQ ID NO: 764 - protein, 10 aa, synthetic construct
FGQGTKLEIK

SEQ ID NO: 765 - protein, 30 aa, synthetic construct
QVQLQQSGAELARPGASVKMSCKASGYTFT

SEQ ID NO: 766 - protein, 17 aa, synthetic construct
YINPSSGYTNYNQKFKD

SEQ ID NO: 767 - protein, 32 aa, synthetic construct
KATLTADKSSSTAYMQLSSLTSEDSAVYYCAR

SEQ ID NO: 768 - protein, 10 aa, synthetic construct
WRDAYYAMDY

SEQ ID NO: 769 - protein, 23 aa, synthetic construct
QIVLTQSPAIMSASPGEKVTMTC

SEQ ID NO: 770 - protein, 9 aa, synthetic construct
QQWSSNPFT

SEQ ID NO: 771 - protein, 5 aa, synthetic construct
GFVMH

SEQ ID NO: 772 - protein, 17 aa, synthetic construct
FINPYNDDIQSNERFRG

SEQ ID NO: 773 - protein, 32 aa, synthetic construct
RVTMTRDTSISTAYMELSRLRSDDTAVYYCAR

SEQ ID NO: 774 - protein, 15 aa, synthetic construct
GNGYNFDGAYRFFDF

SEQ ID NO: 775 - protein, 11 aa, synthetic construct
WGQGTMVTVSS

SEQ ID NO: 776 - protein, 23 aa, synthetic construct
DIVMTQSPLSLPVTPGEPASISC

SEQ ID NO: 777 - protein, 16 aa, synthetic construct
RSSQRLVHSNGNTYLH

SEQ ID NO: 778 - protein, 15 aa, synthetic construct
WYLQKPGQSPRLLIY

SEQ ID NO: 779 - protein, 7 aa, synthetic construct
RVSNRFP

SEQ ID NO: 780 - protein, 32 aa, synthetic construct
GVPDRFSGSGSGTDFTLKISRVEAEDVGVYYC

SEQ ID NO: 781 - protein, 9 aa, synthetic construct
SQSTHVPYT

SEQ ID NO: 782 - protein, 30 aa, synthetic construct
QVQLKESGPGLVAPSQSLSITCTVSGFSLT

SEQ ID NO: 783 - protein, 5 aa, synthetic construct
GYGVN

SEQ ID NO: 784 - protein, 14 aa, synthetic construct
WVRQPPGKGLEWLG

SEQ ID NO: 785 - protein, 16 aa, synthetic construct
MIWGDGSTDYNSALKS

SEQ ID NO: 786 - protein, 32 aa, synthetic construct
RLSITKDNSKSQVFLKMNSLQTDDTARYYCAR

SEQ ID NO: 787 - protein, 13 aa, synthetic construct
DGYSNFHYYVMDY

SEQ ID NO: 788 - protein, 23 aa, synthetic construct
DIVLTQSPASLAVSLGQRATISC

SEQ ID NO: 789 - protein, 15 aa, synthetic construct
RASESVEYYVTSLMQ

SEQ ID NO: 790 - protein, 15 aa, synthetic construct
WYQQKPGQPPKLLIS

SEQ ID NO: 791 - protein, 7 aa, synthetic construct
AASNVES

SEQ ID NO: 792 - protein, 32 aa, synthetic construct
GVPARFSGSGSGTDFSLNIHPVEEDDIAMYFC

SEQ ID NO: 793 - protein, 9 aa, synthetic construct
QQSRKVPWT

SEQ ID NO: 794 - protein, 30 aa, synthetic construct
QVQLQESGPGLVKPSETLSLTCTVSGFSLT

SEQ ID NO: 795 - protein, 14 aa, synthetic construct
WIRQPPGKGLEWIG

SEQ ID NO: 796 - protein, 16 aa, synthetic construct
MIWGDGSTNYNPSLKS

SEQ ID NO: 797 - protein, 32 aa, synthetic construct
RVTISVDTSKNQFSLKLSSVTAADTAVYYCAR

SEQ ID NO: 798 - protein, 5 aa, synthetic construct
SYYIH

SEQ ID NO: 799 - protein, 17 aa, synthetic construct
CIYPGNVNTNYNEKFKD

SEQ ID NO: 800 - protein, 32 aa, synthetic construct
RATLTVDTSISTAYMELSRLRSDDTAVYFCTR

SEQ ID NO: 801 - protein, 11 aa, synthetic construct
SHYGLDWNFDV

SEQ ID NO: 802 - protein, 11 aa, synthetic construct
HASQNIYVWLN

SEQ ID NO: 803 - protein, 7 aa, synthetic construct
KASNLHT

SEQ ID NO: 804 - protein, 9 aa, synthetic construct
QQGQTYPYT

SEQ ID NO: 805 - protein, 30 aa, synthetic construct
QVQLQQSGPELVKPGTSVRISCEASGYTFT

SEQ ID NO: 806 - protein, 32 aa, synthetic construct
KATLIVDTSSNTAYMQLSRMTSEDSAVYFCTR

SEQ ID NO: 807 - protein, 11 aa, synthetic construct
WGAGTTVTVSS

SEQ ID NO: 808 - protein, 23 aa, synthetic construct
DIQMNQSPSSLSASLGDTITITC

SEQ ID NO: 809 - protein, 15 aa, synthetic construct
WYQQKPGNIPKLLIY

SEQ ID NO: 810 - protein, 32 aa, synthetic construct
GVPSRFSGSGSGTGFTLTISSLQPEDIATYYC

SEQ ID NO: 811 - protein, 17 aa, synthetic construct
CIYPGNVNTNYAQKFQG

SEQ ID NO: 812 - protein, 17 aa, synthetic construct
SIYPGNVNTNYAQKFQG

SEQ ID NO: 813 - protein, 30 aa, synthetic construct
QVKLQQSGPGLVTPSQSLSITCTVSGFSLS

SEQ ID NO: 814 - protein, 5 aa, synthetic construct
DYGVH

SEQ ID NO: 815 - protein, 14 aa, synthetic construct
WVRQSPGQGLEWLG

SEQ ID NO: 816 - protein, 16 aa, synthetic construct
VIWAGGGTNYNSALMS

SEQ ID NO: 817 - protein, 32 aa, synthetic construct
RKSISKDNSKSQVFLKMNSLQADDTAVYYCAR

SEQ ID NO: 818 - protein, 12 aa, synthetic construct
DKGYSYYYSMDY

SEQ ID NO: 819 - protein, 23 aa, synthetic construct
DIELTQSPASLAVSLGQRATISC

SEQ ID NO: 820 - protein, 15 aa, synthetic construct
WYQQKPGQPPKLLIF

SEQ ID NO: 821 - protein, 32 aa, synthetic construct
GVPARFSGSGSGTNFSLNIHPVDEDDVAMYFC

SEQ ID NO: 822 - protein, 9 aa, synthetic construct
QQSRKVPYT

SEQ ID NO: 823 - protein, 30 aa, synthetic construct
QVQLQESGPGLVKPSETLSLTCTVSGFSLS

SEQ ID NO: 824 - protein, 16 aa, synthetic construct
VIWAGGGTNYNPSLKS

SEQ ID NO: 825 - protein, 30 aa, synthetic construct
EVQLQQSGPELVKPGASVKMSCKASGYTFT

SEQ ID NO: 826 - protein, 5 aa, synthetic construct
SYVIQ

SEQ ID NO: 827 - protein, 14 aa, synthetic construct
WVKQKPGQGLEWIG

SEQ ID NO: 828 - protein, 17 aa, synthetic construct
SINPYNDYTKYNEKFKG

SEQ ID NO: 829 - protein, 32 aa, synthetic construct
KATLTSDKSSITAYMEFSSLTSEDSALYYCAR

SEQ ID NO: 830 - protein, 6 aa, synthetic construct
WGDGNY

SEQ ID NO: 831 - protein, 11 aa, synthetic construct
WGRGTTLTVSS

SEQ ID NO: 832 - protein, 23 aa, synthetic construct
DIEMTQSPAIMSASLGERVTMTC

SEQ ID NO: 833 - protein, 12 aa, synthetic construct
TASSSVSSSYFH

SEQ ID NO: 834 - protein, 15 aa, synthetic construct
WYQQKPGSSPKLCIY

SEQ ID NO: 835 - protein, 7 aa, synthetic construct
STSNLAS

SEQ ID NO: 836 - protein, 31 aa, synthetic construct
GVPPRFSGSGSTSYSLTISSMEAEDAATYFC

SEQ ID NO: 837 - protein, 8 aa, synthetic construct
HQYHRSPT

SEQ ID NO: 838 - protein, 10 aa, synthetic construct
FGGGTKLETK

SEQ ID NO: 839 - protein, 17 aa, synthetic construct
SINPYNDYTNYAQKFQG

SEQ ID NO: 840 - protein, 30 aa, synthetic construct
DVQLQESGPGLVKPSQSLSLTCTVTGYSIT

SEQ ID NO: 841 - protein, 6 aa, synthetic construct
SDYAWN

SEQ ID NO: 842 - protein, 14 aa, synthetic construct
WIRQFPGNKLEWMG

SEQ ID NO: 843 - protein, 16 aa, synthetic construct
YIRYSGSTSYNPSLKS

SEQ ID NO: 844 - protein, 32 aa, synthetic construct
RISITRDTSKNQFFLQLNSVTTEDTATYYCAR

SEQ ID NO: 845 - protein, 12 aa, synthetic construct
DWPRPSYWYFDV

SEQ ID NO: 846 - protein, 23 aa, synthetic construct
DIQTTQTTSSLSASLGDRVTISC

SEQ ID NO: 847 - protein, 11 aa, synthetic construct
RAGQDISNYLN

SEQ ID NO: 848 - protein, 15 aa, synthetic construct
WYQQKPDGTVKLLIY

SEQ ID NO: 849 - protein, 7 aa, synthetic construct
YTSRLHS

SEQ ID NO: 850 - protein, 32 aa, synthetic construct
GVPSRFSGSGSGTDYSLTISNLEQEDIATYFC

SEQ ID NO: 851 - protein, 9 aa, synthetic construct
QQGHTLPWT

SEQ ID NO: 852 - protein, 30 aa, synthetic construct
QVQLQESGPGLVKPSETLSLTCTVTGYSIT

SEQ ID NO: 853 - protein, 16 aa, synthetic construct
YIRYSGSTNYNPSLKS

SEQ ID NO: 854 - protein, 30 aa, synthetic construct
QVQLQESGPGLVKPSETLSLTCAVSGFSLT

SEQ ID NO: 855 - protein, 5 aa, synthetic construct
SYGVH

SEQ ID NO: 856 - protein, 14 aa, synthetic construct
WIRQPPGKGLEWLG

SEQ ID NO: 857 - protein, 16 aa, synthetic construct
VIWPGGGTNFNSALMS

SEQ ID NO: 858 - protein, 32 aa, synthetic construct
RLTISEDTSKNQVSLKLSSVTAADTAVYYCAR

SEQ ID NO: 859 - protein, 13 aa, synthetic construct
DRAYGNYLYAMDY

SEQ ID NO: 860 - protein, 7 aa, synthetic construct
AASNVDS

SEQ ID NO: 861 - protein, 32 aa, synthetic construct
GVPSRFSGSGSGTDFTLTISSLQPEDIATYYC

SEQ ID NO: 862 - protein, 9 aa, synthetic construct
QQSRKVPFT

SEQ ID NO: 863 - protein, 16 aa, synthetic construct
VIWPGGGTNYNPSLKS

SEQ ID NO: 864 - protein, 30 aa, synthetic construct
QVQLVQSGAEVKKPGSSVKVSCKASGYSIT

SEQ ID NO: 865 - protein, 6 aa, synthetic construct
SGYHWG

SEQ ID NO: 866 - protein, 14 aa, synthetic construct
WIRQAPGQGLEWIG

SEQ ID NO: 867 - protein, 16 aa, synthetic construct
AIYHSGSTYYSPSLKS

SEQ ID NO: 868 - protein, 32 aa, synthetic construct
RVTITADKSTSTAYMELSSLRSEDTAVYYCAR

SEQ ID NO: 869 - protein, 10 aa, synthetic construct
GPLSYYAFDY

SEQ ID NO: 870 - protein, 23 aa, synthetic construct
DIQLTQSPSSLSASVGDRVTITC

SEQ ID NO: 871 - protein, 11 aa, synthetic construct
RASQSVSRYLA

SEQ ID NO: 872 - protein, 7 aa, synthetic construct
DASNRAT

SEQ ID NO: 873 - protein, 32 aa, synthetic construct
GIPSRFSGSGSGTDFTLTISSLQPEDFATYYC

SEQ ID NO: 874 - protein, 9 aa, synthetic construct
QQYYRSPIT

SEQ ID NO: 875 - protein, 11 aa, synthetic construct
RASQPIGHTLG

SEQ ID NO: 876 - protein, 7 aa, synthetic construct
WASDLIR

SEQ ID NO: 877 - protein, 9 aa, synthetic construct
QQMLRTPFM

SEQ ID NO: 878 - protein, 30 aa, synthetic construct
QVQLKQSGPGSVQSSQSLSITCTVSGFSLT

SEQ ID NO: 879 - protein, 5 aa, synthetic construct
TYAVH

SEQ ID NO: 880 - protein, 14 aa, synthetic construct
WVRQSPGKGLEWLG

SEQ ID NO: 881 - protein, 16 aa, synthetic construct
VIWSGGITDYNAAFIS

SEQ ID NO: 882 - protein, 32 aa, synthetic construct
RLSITKDDSKSQVFFKMNSLQPNDTAIYYCAR

SEQ ID NO: 883 - protein, 14 aa, synthetic construct
NGGDNYPYYYAMDY

SEQ ID NO: 884 - protein, 23 aa, synthetic construct
DIVMTQAAFSNPVTLGTSASISC

SEQ ID NO: 885 - protein, 16 aa, synthetic construct
RSSKSLLHSNGITYLY

SEQ ID NO: 886 - protein, 15 aa, synthetic construct
WYLQKPGQSPQLLIY

SEQ ID NO: 887 - protein, 7 aa, synthetic construct
QMSNLAS

SEQ ID NO: 888 - protein, 32 aa, synthetic construct
GVPDRFSSSGSGTDFTLRISRVEAEDVGVYYC

SEQ ID NO: 889 - protein, 9 aa, synthetic construct
AQNLELPLT

SEQ ID NO: 890 - protein, 16 aa, synthetic construct
VIWSGGITNYNPSLKS

SEQ ID NO: 891 - protein, 30 aa, synthetic construct
QVQLQQWGAGLLKPSETLSLTCAVYGGSFS

SEQ ID NO: 892 - protein, 5 aa, synthetic construct
GYYWS

SEQ ID NO: 893 - protein, 14 aa, synthetic construct
WIRQSPEKGLEWIG

SEQ ID NO: 894 - protein, 16 aa, synthetic construct
EINHGGYVTYNPSLES

SEQ ID NO: 895 - protein, 13 aa, synthetic construct
DYGPGNYDWYFDL

SEQ ID NO: 896 - protein, 11 aa, synthetic construct
WGRGTLVTVSS

SEQ ID NO: 897 - protein, 11 aa, synthetic construct
RASQSVSSYLA

SEQ ID NO: 898 - protein, 11 aa, synthetic construct
QQRSNWPPALT

SEQ ID NO: 899 - protein, 30 aa, synthetic construct
EVQLVQSGAEVKKPGESLRISCKGSGYSFS

SEQ ID NO: 900 - protein, 5 aa, synthetic construct
TYWIS

SEQ ID NO: 901 - protein, 14 aa, synthetic construct
WVRQMPGKGLEWMG

SEQ ID NO: 902 - protein, 17 aa, synthetic construct
KIYPGDSYTNYSPSFQG

SEQ ID NO: 903 - protein, 32 aa, synthetic construct
QVTISADKSISTAYLQWSSLKASDTAMYYCAR

SEQ ID NO: 904 - protein, 7 aa, synthetic construct
GYGIFDY

SEQ ID NO: 905 - protein, 22 aa, synthetic construct
SYELTQPPSVSVSPGQTASITC

SEQ ID NO: 906 - protein, 11 aa, synthetic construct
SGDNIGDQYAH

SEQ ID NO: 907 - protein, 15 aa, synthetic construct
WYQQKPGQSPVLVIY

SEQ ID NO: 908 - protein, 7 aa, synthetic construct
QDKNRPS

SEQ ID NO: 909 - protein, 32 aa, synthetic construct
GIPERFSGSNSGNTATLTISGTQAMDEADYYC

SEQ ID NO: 910 - protein, 11 aa, synthetic construct
ATYTGFGSLAV

SEQ ID NO: 911 - protein, 30 aa, synthetic construct
QVQLVQSGAEVVKPGASVKLSCKASGYTFS

SEQ ID NO: 912 - protein, 5 aa, synthetic construct
SYWMH

SEQ ID NO: 913 - protein, 14 aa, synthetic construct
WVKQAPGQVLEWIG

SEQ ID NO: 914 - protein, 17 aa, synthetic construct
EINPGNGHTNYNEKFKS

SEQ ID NO: 915 - protein, 32 aa, synthetic construct
KATLTVDKSASTAYMELSSLRSEDTAVYYCAR

SEQ ID NO: 916 - protein, 10 aa, synthetic construct
SFTTARAFAY

SEQ ID NO: 917 - protein, 23 aa, synthetic construct
DIVMTQSPATQSVSPGERVTLSC

SEQ ID NO: 918 - protein, 11 aa, synthetic construct
RASQTISDYLH

SEQ ID NO: 919 - protein, 15 aa, synthetic construct
WYQQKPGQSPRLLIK

SEQ ID NO: 920 - protein, 7 aa, synthetic construct
YASQSIS

SEQ ID NO: 921 - protein, 32 aa, synthetic construct
GIPSRFSGSGSGSDFTLTISSVEPEDFGVYYC

SEQ ID NO: 922 - protein, 9 aa, synthetic construct
QDGHSFPPT

SEQ ID NO: 923 - protein, 30 aa, synthetic construct
QVQLVQSGAEVKKPGASVKVSCKASGYTFS

SEQ ID NO: 924 - protein, 14 aa, synthetic construct
WVRQAPGQRLEWMG

SEQ ID NO: 925 - protein, 17 aa, synthetic construct
EINPGNGHTNYSQKFQG

SEQ ID NO: 926 - protein, 32 aa, synthetic construct
RVTITVDKSASTAYMELSSLRSEDTAVYYCAR

SEQ ID NO: 927 - protein, 23 aa, synthetic construct
DIVMTQSPPTLSLSPGERVTLSC

SEQ ID NO: 928 - protein, 11 aa, synthetic construct
RASQSISDYLH

SEQ ID NO: 929 - protein, 30 aa, synthetic construct
QVQLVESGGGVVQPGRSLRLSCAASGFTFS

SEQ ID NO: 930 - protein, 5 aa, synthetic construct
SYVLH

SEQ ID NO: 931 - protein, 14 aa, synthetic construct
WVRQAPGKGLDWVA

SEQ ID NO: 932 - protein, 17 aa, synthetic construct
VISDDGRNKYFADSVKG

SEQ ID NO: 933 - protein, 32 aa, synthetic construct
RFTISRDNSKNTLYLQMNSLRAEDTAVYYCVR

SEQ ID NO: 934 - protein, 10 aa, synthetic construct
EGYSGSWFDY

SEQ ID NO: 935 - protein, 23 aa, synthetic construct
AIQLTQSPSSLSASVGDRVTITC

SEQ ID NO: 936 - protein, 11 aa, synthetic construct
RASQGISSALA

SEQ ID NO: 937 - protein, 7 aa, synthetic construct
GASSLEG

SEQ ID NO: 938 - protein, 9 aa, synthetic construct
QQFNSYPFT

SEQ ID NO: 939 - protein, 10 aa, synthetic construct
FGPGTKVDIK

SEQ ID NO: 940 - protein, 5 aa, synthetic construct
SYAMH

SEQ ID NO: 941 - protein, 17 aa, synthetic construct
VISYDGRNKDYADSVKG

SEQ ID NO: 942 - protein, 32 aa, synthetic construct
RFTISRDNSKNTLYLQMNSLRAEDTAVHYCAR

SEQ ID NO: 943 - protein, 10 aa, synthetic construct
LDWGYDAFDI

SEQ ID NO: 944 - protein, 23 aa, synthetic construct
EIVLTQSPGTLSLSPGERATLSC

SEQ ID NO: 945 - protein, 12 aa, synthetic construct
RASQSVSSSYLA

SEQ ID NO: 946 - protein, 7 aa, synthetic construct
GASSRAT

SEQ ID NO: 947 - protein, 32 aa, synthetic construct
GIPDRFSGSGSGTDFTLTISRLEPEDFAVYYC

SEQ ID NO: 948 - protein, 10 aa, synthetic construct
QQYGSSPPYT

SEQ ID NO: 949 - protein, 30 aa, synthetic construct
EIQLQQTGPELVKPGASVKISCKASGYSFT

SEQ ID NO: 950 - protein, 5 aa, synthetic construct
DYIIF

SEQ ID NO: 951 - protein, 14 aa, synthetic construct
WVKQSHGKSLEWTG

SEQ ID NO: 952 - protein, 17 aa, synthetic construct
NINPYYGSTSYNLKFKG

SEQ ID NO: 953 - protein, 32 aa, synthetic construct
KATLTVDKSSSTAYMQLNSLTSEDSAVYYCVR

SEQ ID NO: 954 - protein, 14 aa, synthetic construct
GVYYYGSSYEAFPY

SEQ ID NO: 955 - protein, 23 aa, synthetic construct
DIQLTQSPLTLSITIGQPASISC

SEQ ID NO: 956 - protein, 16 aa, synthetic construct
KSSQSLLDSDGKTYLN

SEQ ID NO: 957 - protein, 15 aa, synthetic construct
WLLQRPGQSPTRLIY

SEQ ID NO: 958 - protein, 7 aa, synthetic construct
LVSKLDS

SEQ ID NO: 959 - protein, 32 aa, synthetic construct
GVPDRFTGSGSGTDFTLKISRVEAEDLGIYYC

SEQ ID NO: 960 - protein, 9 aa, synthetic construct
WQGAHFPQT

SEQ ID NO: 961 - protein, 30 aa, synthetic construct
QVQLVQSGAEVKKPGASVKVSCKASGYSFT

SEQ ID NO: 962 - protein, 17 aa, synthetic construct
NINPYYGSTNYAQKFQG

SEQ ID NO: 963 - protein, 30 aa, synthetic construct
QVQLVESGGGVVQPGRSLRLDCKASGITFS

SEQ ID NO: 964 - protein, 5 aa, synthetic construct
NSGMH

SEQ ID NO: 965 - protein, 17 aa, synthetic construct
VIWYDGSKRYYADSVKG

SEQ ID NO: 966 - protein, 32 aa, synthetic construct
RFTISRDNSKNTLFLQMNSLRAEDTAVYYCAT

SEQ ID NO: 967 - protein, 4 aa, synthetic construct
NDDY

SEQ ID NO: 968 - protein, 9 aa, synthetic construct
QQSSNWPRT

SEQ ID NO: 969 - protein, 30 aa, synthetic construct
QVQLVQSGVEVKKPGASVKVSCKASGYTFT

SEQ ID NO: 970 - protein, 5 aa, synthetic construct
NYYMY

SEQ ID NO: 971 - protein, 17 aa, synthetic construct
GINPSNGGTNFNEKFKN

SEQ ID NO: 972 - protein, 32 aa, synthetic construct
RVTLTTDSSTTTAYMELKSLQFDDTAVYYCAR

SEQ ID NO: 973 - protein, 11 aa, synthetic construct
RDYRFDMGFDY

SEQ ID NO: 974 - protein, 15 aa, synthetic construct
RASKGVSTSGYSYLH

SEQ ID NO: 975 - protein, 7 aa, synthetic construct
LASYLES

SEQ ID NO: 976 - protein, 32 aa, synthetic construct
GVPARFSGSGSGTDFTLTISSLEPEDFAVYYC

SEQ ID NO: 977 - protein, 9 aa, synthetic construct
QHSRDLPLT

SEQ ID NO: 978 - protein, 14 aa, synthetic construct
WVRQAPGKGLEWVT

SEQ ID NO: 979 - protein, 17 aa, synthetic construct
FISYDGNNKYYADSVKG

SEQ ID NO: 980 - protein, 32 aa, synthetic construct
RFTISRDNSKNTLYLQMNSLRAEDTAIYYCAR

SEQ ID NO: 981 - protein, 9 aa, synthetic construct
TGWLGPFDY

SEQ ID NO: 982 - protein, 12 aa, synthetic construct
RASQSVGSSYLA

SEQ ID NO: 983 - protein, 7 aa, synthetic construct
GAFSRAT

SEQ ID NO: 984 - protein, 9 aa, synthetic construct
QQYGSSPWT

SEQ ID NO: 985 - protein, 5 aa, synthetic construct
GHWMN

SEQ ID NO: 986 - protein, 14 aa, synthetic construct
WVRQAPGKGLEWVG

SEQ ID NO: 987 - protein, 19 aa, synthetic construct
IMIHPSDSETRYNQKFKDI

SEQ ID NO: 988 - protein, 32 aa, synthetic construct
RFTISVDKSKNTLYLQMNSLRAEDTAVYYCAR

SEQ ID NO: 989 - protein, 14 aa, synthetic construct
IGIYFYGTTYFDYI

SEQ ID NO: 990 - protein, 11 aa, synthetic construct
RASKTISKYLA

SEQ ID NO: 991 - protein, 15 aa, synthetic construct
WXQQKPGKAPKLLIY

SEQ ID NO: 992 - protein, 7 aa, synthetic construct
SGSTLQS

SEQ ID NO: 993 - protein, 9 aa, synthetic construct
QQHNEYPLT

SEQ ID NO: 994 - protein, 30 aa, synthetic construct
EVQLVESGGGLVQPGGSLRLSCATSGYTFT

SEQ ID NO: 995 - protein, 5 aa, synthetic construct
EYTMH

SEQ ID NO: 996 - protein, 14 aa, synthetic construct
WMRQAPGKGLEWVA

SEQ ID NO: 997 - protein, 17 aa, synthetic construct
GINPKNGGTSHNQRFMD

SEQ ID NO: 998 - protein, 32 aa, synthetic construct
RFTISVDKSTSTAYMQMNSLRAEDTAVYYCAR

SEQ ID NO: 999 - protein, 15 aa, synthetic construct
WRGLNYGFDVRYFDV

SEQ ID NO: 1000 - protein, 11 aa, synthetic construct
RASQDINNYLN

SEQ ID NO: 1001 - protein, 7 aa, synthetic construct
YTSTLHS

SEQ ID NO: 1002 - protein, 9 aa, synthetic construct
QQGNTLPPT

SEQ ID NO: 1003 - protein, 30 aa, synthetic construct
QIQLVQSGPELKKPGETVRISCKASGYAFT

SEQ ID NO: 1004 - protein, 5 aa, synthetic construct
TTGMQ

SEQ ID NO: 1005 - protein, 14 aa, synthetic construct
WVQEMPGKGLKWIG

SEQ ID NO: 1006 - protein, 17 aa, synthetic construct
WINTPLWSAKICRRLQG

SEQ ID NO: 1007 - protein, 32 aa, synthetic construct
RFAFSLETSANTAYLQISNLKDEDTATYFCVR

SEQ ID NO: 1008 - protein, 13 aa, synthetic construct
SGNGNYDLAYFAY

SEQ ID NO: 1009 - protein, 10 aa, synthetic construct
WGQGTLVTVS

SEQ ID NO: 1010 - protein, 23 aa, synthetic construct
DIVLTQSPATLSVTPGDRVSLSC

SEQ ID NO: 1011 - protein, 11 aa, synthetic construct
PASQSISDYLH

SEQ ID NO: 1012 - protein, 15 aa, synthetic construct
WYOQKSHESPRLLIK

SEQ ID NO: 1013 - protein, 7 aa, synthetic construct
YASHSIS

SEQ ID NO: 1014 - protein, 32 aa, synthetic construct
GIPSRFSGSGSGSDFTLSTNSVEPEDVGIYYC

SEQ ID NO: 1015 - protein, 9 aa, synthetic construct
QHGHSFPWT

SEQ ID NO: 1016 - protein, 30 aa, synthetic construct
EVQLQQSGAELMKPGASVKISCKATGYTFS

SEQ ID NO: 1017 - protein, 5 aa, synthetic construct
SYWIE

SEQ ID NO: 1018 - protein, 14 aa, synthetic construct
WVKQRPGHGLEWIG

SEQ ID NO: 1019 - protein, 17 aa, synthetic construct
EILPGGGDTNYNEIFKG

SEQ ID NO: 1020 - protein, 31 aa, synthetic construct
KATFTDTSSNTAYMQLSSLTSEDSAVYYCTR

SEQ ID NO: 1021 - protein, 8 aa, synthetic construct
RVPVYFDY

SEQ ID NO: 1022 - protein, 15 aa, synthetic construct
KASQSVDYDGDSFLN

SEQ ID NO: 1023 - protein, 15 aa, synthetic construct
WYQQKPGQPPKLFIY

SEQ ID NO: 1024 - protein, 7 aa, synthetic construct
AASNLES

SEQ ID NO: 1025 - protein, 32 aa, synthetic construct
GIPARFSGSGSGTDFTLNIHPVEEEDAATYYC

SEQ ID NO: 1026 - protein, 9 aa, synthetic construct
QQSNEDPLT

SEQ ID NO: 1027 - protein, 10 aa, synthetic construct
FGAGTELELK

SEQ ID NO: 1028 - protein, 30 aa, synthetic construct
EVQLVESGGGLVQPGGSLRLSCAASGYTFS

SEQ ID NO: 1029 - protein, 31 aa, synthetic construct
RATFSADTSKNTAYLQMSLRAEDTAVYYCTR

SEQ ID NO: 1030 - protein, 8 aa, synthetic construct
RVPIRLDY

SEQ ID NO: 1031 - protein, 15 aa, synthetic construct
KASQSVDYEGDSFLN

SEQ ID NO: 1032 - protein, 30 aa, synthetic construct
QVQLVQSGAEVKKPGSSVKVSCKASGYTFS

SEQ ID NO: 1033 - protein, 5 aa, synthetic construct
DYVIN

SEQ ID NO: 1034 - protein, 17 aa, synthetic construct
EIYPGSGTNYYNEKFKA

SEQ ID NO: 1035 - protein, 32 aa, synthetic construct
KATITADKSTSTAYMELSSLRSEDTAVYYCAR

SEQ ID NO: 1036 - protein, 11 aa, synthetic construct
RGRYGLYAMDY

SEQ ID NO: 1037 - protein, 11 aa, synthetic construct
RASQDISNYLN

SEQ ID NO: 1038 - protein, 32 aa, synthetic construct
GVPSRFSGSGSGTDFTFTISSLQPEDIATYFC

SEQ ID NO: 1039 - protein, 9 aa, synthetic construct
QQGNTRPWT

SEQ ID NO: 1040 - protein, 5 aa, synthetic construct
SFTMH

SEQ ID NO: 1041 - protein, 17 aa, synthetic construct
YINPSSGYTEYNQKFKD

SEQ ID NO: 1042 - protein, 32 aa, synthetic construct
RVTITADKSTSTAYMELSSLRSEDTAVYYCVR

SEQ ID NO: 1043 - protein, 8 aa, synthetic construct
GSSRGFDY

SEQ ID NO: 1044 - protein, 11 aa, synthetic construct
RASENIYSNLA

SEQ ID NO: 1045 - protein, 15 aa, synthetic construct
WFQQKPGKAPKLLVY

SEQ ID NO: 1046 - protein, 7 aa, synthetic construct
AATNLAD

SEQ ID NO: 1047 - protein, 9 aa, synthetic construct
QHFWGTPRT

SEQ ID NO: 1048 - DNA, 1449 bp, synthetic construct
  source 1..1449: mol_type = other DNA
gcggccgcaaactacaagacagacttgcaaaagaaggcatgcacagctcagcactgctctgttgcctggtcctcctgactggggtgagggccggactgcagaaagctgtggtgaacctggaccccaagtgggtgagggtgctggaagaggacagcgtgacactgaggtgtcagggaacatttagccccgaggacaactctattaaatggttccataacgagagtctgatcccccaccaggacgcaaactatgtgatccagagcgcaagggtgaaggactccggaatgtacaggtgccagaccgccctgagcacaatcagcgaccccgtgcagctggaggtgcacatgggctggctgctgctgcagaccaccaagtggctgtttcaggagggagaccctatccacctgaggtgtcactcctggcagaacaggcccgtgaggaaggtgacctacctgcagaacggaaaaggcaaaaagtacttccacgaaaactccgagctgctgattcctaaagccacccacaacgactccggctcctacttctgccggggcctgatcggccataacaacaaaagcagcgcctccttccggatctccctgggcgaccccggctccccttccatgttcccaccctggcaccagggtggtggcggatcaggtgggggaggctctggtggaggcggtagtgaggtgcagctggtggagagcggggggggactggtgcagccaggaaagagcctgaagctgtcctgtgaggcaagcgggtttacattcagcggatatgggatgcactgggtgaggcaggcaccaggcagggggctggagagcgtggcatacatcacctccagcagcatcaacatcaaatacgccgacgccgtgaagggcaggttcaccgtgtccagggacaacgctaagaacctgctgttcctgcagatgaacatcctgaagtccgaggacaccgccatgtactactgcgccaggttcgattgggataagaactattggggccagggaaccatggtgaccgtgtccagcggtggcggagggtctggtggtggaggatcagggggtggaggttcaggaggcgggggaagtgacattcagatgacccagagcccctcctccctgcccgcctctctgggagacagggtgacaatcaactgccaggcctcccaggacatctccaactacctgaactggtatcagcagaaacccggcaaagcccccaaactgctgatctactacaccaataagctggcagacggagtgccctcccgcttctccggttccggctccggacgggactcctccttcaccatctcctccctggaatccgaggacatcggctcctactactgccagcagtactacaactatccctggaccttcggccccggcaccaagctggagatcaagggaggacatcatcatcatcaccattgattctaga

SEQ ID NO: 1049 - DNA, 1455 bp, synthetic construct
  source 1..1455: mol_type = other DNA
gcggccgcaaactacaagacagacttgcaaaagaaggcatgcacagctcagcactgctctgttgcctggtcctcctgactggggtgagggccggactgcagaaagctgtggtgaacctggaccccaagtgggtgagggtgctggaagaggacagcgtgacactgaggtgtcagggaacatttagccccgaggacaactctattaaatggttccataacgagagtctgatcccccaccaggacgcaaactatgtgatccagagcgcaagggtgaaggactccggaatgtacaggtgccagaccgccctgagcacaatcagcgaccccgtgcagctggaggtgcacatgggctggctgctgctgcagaccaccaagtggctgtttcaggagggagaccctatccacctgaggtgtcactcctggcagaacaggcccgtgaggaaggtgacctacctgcagaacggaaaaggcaaaaagtacttccacgaaaactccgagctgctgattcctaaagccacccacaacgactccggctcctacttctgccggggcctgatcggccataacaacaaaagcagcgcctccttccggatctccctgggcgaccccggctccccttccatgttcccaccctggcaccagggtggtggcggatcaggtgggggaggctctggtggaggcggtagtgaggtgtatctggtggagtccggaggcggactggtgcagcccggaggaagcgtgaagctgtcctgctccgcaagcgggttcacatttagtacctttcccatggcctgggtgaggcaggcccccacacagggactgcagtgggtggcaactctgagccccagtggagactccacctattatagggacagtgtgaagggccgattcaccatctcccgcgacaacgtgctgaacaccctgtacctgcacatggacatcctgaggtccgaagacaccgccacctactactgcaccaaggtgggattcaccaccttctatttcgactcctggggccagggagtgatggtggccgtgtcctccggtggcggagggtctggtggtggaggatcagggggtggaggttcaggaggcgggggaagtgacattcagatgacccagagcccctccttcctgtccgcctccgtgggagaccgcgtgactatcaactgcaaggccagccagaacatcaacaagtacctggactggtatcaacagaagttcggcgaaacccccaaactgctgatctacaacatcaataacctgcactccggcgtgccctccagattctccggaagcggctccggccccgacttcaccctgactatctcctccctgcagcccgaagacgtggcaacctacttctgcctgcagcacagaaccggctggacatttggcggcggcactaaggtggagctgcgcggaggacatcatcatcatcaccattgattctaga

SEQ ID NO: 1050 - DNA, 1461 bp, synthetic construct
  source 1..1461: mol_type = other DNA
gcggccgcaaactacaagacagacttgcaaaagaaggcatgcacagctcagcactgctctgttgcctggtcctcctgactggggtgagggccggactgcagaaagctgtggtgaacctggaccccaagtgggtgagagtgctggaagaggacagcgtgacactgaggtgtcagggaacatttagccccgaggacaattcaattaagtggttccacaacgagtccctgattccacaccaggacgccaactatgtgatccagagcgcaagggtgaaagactccggaatgtacaggtgccagaccgctctgagcacaatctccgaccctgtgcagctggaggtgcacatgggatggctgctgctgcagactaccaagtggctgtttcaggagggagatcctatccacctcaggtgccactcctggcagaacagacctgtcaggaaggtgacctacctgcagaatggcaaggggaaaaagtacttccacgaaaactccgagctgctcattcccaaggccacccataacgactccggctcctacttctgccgcggactgattggacataacaacaaaagcagcgcttcctttaggatctccctcggcgaccctggttccccttccatgtttccaccctggcaccagggtggtggcggatcaggtgggggaggctctggtggaggcggtagtcaggtgaagctccagcagtctggaagcgaactcggcaagcctggagcaagtgtgaaactctcctgcaaaacaagcggctacatcttcacagaccactacatctcctgggtcaaacagaagcccggcgaatccctccagtggattggaaacgtgtacggcgggaatggcgggacctcctacaatcagaaattccagggcaaggccaccctgacagtcgataagatctcctccaccgcctacatggaactgtcctccctgacctccgaggattccgctatctactattgcgcccggcggcctgtggctaccggacacgctatggactactggggtcagggaatccaggtgaccgtgtctagcggtggcggagggtctggtggtggaggatccgggggaggaggttcaggaggcgggggaagtgacatcgtgctgacccagacacctgctaccctgtctctgatccccggagaaagagtgaccatgacctgcaagacctcccagaacatcggcaccatcctgcattggtatcatcagaaacctaaggaagcccccagagccctcattaaatacgcctcccagtccatccccggcattccttccagattctccggctctggctccgaaaccgacttcacactctccatcaacaatctcgaacccgacgacatcggcatctactactgccagcagtcccggtcttggcctgtgacctttggtccaggaaccaaactggagatcaagggcggccaccatcaccatcatcactgactctaga

SEQ ID NO: 1051 - DNA, 1422 bp, synthetic construct
  source 1..1422: mol_type = other DNA
gcggccgcaaactacaagacagacttgcaaaagaaggcatgcacagctcagcactgctctgttgcctggtcctcctgactggggtgagggccggattgcagaaggctgtggtgaacttggaccccaagtgggtgagggtgttggaggaagattctgttacactgaggtgccagggcacatttagccccgaagataattctattaagtggttccacaacgagtccctgattccacaccaggacgcaaactatgtgatccagagtgcaagggtgaaggactccgggatgtacagatgccagaccgctctgagcaccatttccgaccctgtccagctggaggtgcacatgggatggttgttgttgcagactaccaagtggctgtttcaggagggcgaccctatccacctgaggtgccactcctggcagaacagacctgttaggaaagtgacatatctgcagaacggcaaggggaagaagtacttccacgaaaactccgaactgctgattcccaaggccacccacaacgactccggaagctacttctgccggggattgatcggacacaacaacaaaagcagcgcttcctttaggatctccctcggcgaccctggtagcccttccatgtttccaccctggcaccagggtggtggcggatcaggtgggggaggctctggtggaggcggtagtatcgagcccagagggcccacaatcaagccctgtcctccatgcaaatgcccagcacctaacgccgcaggtggaccatccgtcttcatcttccctccaaagatcaaggatgtactcatgatctccctgagccccatagtcacatgtgtggtggtggatgtgagcgaggatgacccagatgtccagatcagctggtttgtgaacaacgtggaagtacacacagctcagacacaaacccatagagaggattacaacagtactctccgggtggtcagtgccctccccatccagcaccaggactggatgagtggcaaggagttcaaatgcaaggtcaacaacaaagacctcggagcgcccatcgagagaaccatctcaaaacccaaagggtcagtaagagctccacaggtatatgtcttgcctccaccagaaaaggagatgacaaagaagcaggtgagcctgacatgcctggtgaaggacttcatgcctgaagacatttacgtggagtggaccaacaacgggaaaacagagctaaactacaagaacactgaaccagtcctgaagtctgatggttcttacttcatgtacagcaagctgaccgtggaaaagaagaactgggtggaaagaaatagctactcctgttcagtggtccacgagggtctgcacaatcaccacacgactaagagcttctcccggactccgggtaaaggaggacatcatcatcatcaccattgattctaga

SEQ ID NO: 1052 - DNA, 2874 bp, synthetic construct
  source 1..2874: mol_type = other DNA
gcggccgcaaactacaagacagacttgcaaaagaaggcatgcacagctcagcactgctctgttgcctggtcctcctgactggggtgagggccggattgcagaaggctgtggtgaacttggaccccaagtgggtgagggtgttggaggaagattctgttacactgaggtgccagggcacatttagccccgaagataattctattaagtggttccacaacgagtccctgattccacaccaggacgcaaactatgtgatccagagtgcaagggtgaaggactccgggatgtacagatgccagaccgctctgagcaccatttccgaccctgtccagctggaggtgcacatgggatggttgttgttgcagactaccaagtggctgtttcaggagggcgaccctatccacctgaggtgccactcctggcagaacagacctgttaggaaagtgacatatctgcagaacggcggccgcaaactacaagacagacttgcaaaagaaggcatgcacagctcagcactgctctgttgcctggtcctcctgactggggtgagggcccaggttaagctccagcagtcaggcagcgagctcggaaaaccaggagcatcagttaaactctcctgcaagacctccggctacatcttcaccgaccactacatctcctgggtgaaacagaagcccggcgaatccctccagtggattggaaacgtgtacggcggcaacggcggaacctcctacaatcagaaattccagggcaaggccaccctgaccgtggacaagattagcagcaccgcctacatggaactgtcctccctgacctctgaggactccgctatttactattgcgcccggaggcccgtcgctaccggacacgctatggactattggggacagggcatccaggtgaccgtttcttccgctaaaacaacagccccatcggtctatccactggcccctgtgtgtggagatacaactggctcctcggtgactctaggatgcctggtcaagggttatttccctgagccagtgaccttgacctggaactctggatctctgtccagtggtgtgcacaccttcccagctgtcctgcagtctgacctctacaccctcagcagctcagtgactgtaacctcgagcacctggcccagccagtccatcacctgcaatgtggcccacccggcaagcagcaccaaggtggacaagaaaattgagcccagagggcccacaatcaagccctgtcctccatgcaaatgcccagcacctaacgccgcaggtggaccatccgtcttcatcttccctccaaagatcaaggatgtactcatgatctccctgagccccatagtcacatgtgtggtggtggatgtgagcgaggatgacccagatgtccagatcagctggtttgtgaacaacgtggaagtacacacagctcagacacaaacccatagagaggattacaacagtactctccgggtggtcagtgccctccccatccagcaccaggactggatgagtggcaaggagttcaaatgcaaggtcaacaacaaagacctcggagcgcccatcgagagaaccatctcaaaacccaaagggtcagtaagagctccacaggtatatgtcttgcctccaccagaagaagagatgactaagaaacaggtctccttgacctgcctggttaaggacttcatgcctgaagacatttacgtggagtggaccaacaacgggaaaacagagctaaactacaagaacactgaaccagtcctggactctgatggttcttacttcatgtacagcgacttgaccgtggaaaagaagaactgggtggaaagaaatagctactcctgttcagtggtccacgagggtctgcacaatcaccacacgactgactctttctcccggacacctggaaagtgattctagagcaaggggaagaagtacttccacgaaaactccgaactgctgattcccaaggccacccacaacgactccggaagctacttctgccggggattgatcggacacaacaacaaaagcagcgcttcctttaggatctccctcggcgaccctggtagcccttccatgtttccaccctggcaccagggtggtggcggatcaggtgggggaggctctggtggaggcggtagtatcgagcccagagggcccacaatcaagccctgtcctccatgcaaatgcccagcacctaacgccgcaggtggaccatccgtcttcatcttccctccaaagatcaaggatgtactcatgatctccctgagccccatagtcacatgtgtggtggtggatgtgagcgaggatgacccagatgtccagatcagctggtttgtgaacaacgtggaagtacacacagctcagacacaaacccatagagaggattacaacagtactctccgggtggtcagtgccctccccatccagcaccaggactggatgagtggcaaggagttcaaatgcaaggtcaacaacaaagacctcggagcgcccatcgagagaaccatctcaaaacccaaagggtcagtaagagctccacaggtatatgtcttgcctccaccagaaaaggagatgacaaagaagcaggtgagcctgacatgcctggtgaaggacttcatgcctgaagacatttacgtggagtggaccaacaacgggaaaacagagctaaactacaagaacactgaaccagtcctgaagtctgatggttcttacttcatgtacagcaagctgaccgtggaaaagaagaactgggtggaaagaaatagctactcctgttcagtggtccacgagggtctgcacaatcaccacacgactaagagcttctcccggactccgggtaaaggaggacatcatcatcatcaccattgattctaga

SEQ ID NO: 1053 - DNA, 744 bp, synthetic construct
  source 1..744: mol_type = other DNA
gcggccgcaaactacaagacagacttgcaaaagaaggcatgcacagctcagcactgctctgttgcctggtcctcctgactggggtgagggccgacatcgtgctgacccagacacctgctaccctgtctctgatccccggagaaagagtgaccatgacctgcaagacctcccagaacatcggcaccatcctgcattggtaccaccagaaacccaaggaagcccccagagcactcattaaatacgcctcccagtccatccccggcattccttccagattctccggctctggctccgaaaccgacttcacactctccatcaacaacctcgaaccagacgacatcggcatttactactgccagcagtcccgctcctggcctgtgaccttcggacctggaactaagctggagatcaagagagcagatgctgcaccaactgtatccatcttcccaccatccagtgagcagttaacatctggaggtgcctcagtcgtgtgcttcttgaacaacttctaccccaaagacatcaatgtcaagtggaagattgatggcagtgaacgacaaaatggcgtcctgaacagttggactgatcaggacagcaaagacagcacctacagcatgagcagcaccctcacgttgaccaaggacgagtatgaacgacataacagctatacctgtgaggccactcacaagacatcaacttcacccattgtcaagagcttcaacaggaatgagtgttgattctaga

SEQ ID NO: 1054 - DNA, 1851 bp, synthetic construct
  source 1..1851: mol_type = other DNA
gcggccgcaaactacaagacagacttgcaaaagaaggcatgcacagctcagcactgctctgttgcctggtcctcctgactggggtgagggcccaggttcagctccaggaaagcggaggaggactcgttcagccaggaggatcactcaggctctcctgtgaggcatcaggcttcacattctccaggttcggcatgacatgggtgaggcaggcacctggaaaaggcgttgagtgggtgagcggaatttccagcctgggagactccaccctgtacgctgattccgttaaaggcaggttcaccatcagtagggacaacgctaagaacaccctgtacctgcagatgaatagtttgaagcccgaggacaccgccgtgtactactgtacaatcggcggaagcctcaatcccggcggacagggaacccaggtgaccgtgtcctccggtggtggcggatcaggtgggggaggctctggtggaggcggtagtggattgcagaaggctgtggtgaacttggaccccaagtgggtgagggtgttggaggaagattctgttacactgaggtgccagggcacatttagccccgaagataattctattaagtggttccacaacgagtccctgattccacaccaggacgcaaactatgtgatccagagtgcaagggtgaaggactccgggatgtacagatgccagaccgctctgagcaccatttccgaccctgtccagctggaggtgcacatgggatggttgttgttgcagactaccaagtggctgtttcaggagggcgaccctatccacctgaggtgccactcctggcagaacagacctgttaggaaagtgacatatctgcagaacggcaaggggaagaagtacttccacgaaaactccgaactgctgattcccaaggccacccacaacgactccggaagctacttctgccggggattgatcggacacaacaacaaaagcagcgcttcctttaggatctccctcggcgaccctggtagcccttccatgtttccaccctggcaccagggtggcggtggatctggaggcggaggtagtggtgggggaggttcacaggttaagctccagcagtcaggcagcgagctcggaaaaccaggagcatcagttaaactctcctgcaagacctccggctacatcttcaccgaccactacatctcctgggtgaaacagaagcccggcgaatccctccagtggattggaaacgtgtacggcggcaacggcggaacctcctacaatcagaaattccagggcaaggccaccctgaccgtggacaagattagcagcaccgcctacatggaactgtcctccctgacctctgaggactccgctatttactattgcgcccggaggcccgtcgctaccggacacgctatggactattggggacagggcatccaggtgaccgtttcttccggtggcggagggtctggtggtggaggatccgggggaggaggttcaggaggcgggggaagtgacatcgtgctgacccagacacctgctaccctgtctctgatccccggagaaagagtgaccatgacctgcaagacctcccagaacatcggcaccatcctgcattggtaccaccagaaacccaaggaagcccccagagcactcattaaatacgcctcccagtccatccccggcattccttccagattctccggctctggctccgaaaccgacttcacactctccatcaacaacctcgaaccagacgacatcggcatttactactgccagcagtcccgctcctggcctgtgaccttcggacctggaactaagctggagatcaagggcggccaccatcaccaccaccattgattctaga

SEQ ID NO: 1055 - DNA, 1440 bp, synthetic construct
  source 1..1440: mol_type = other DNA
gcggccgcaaactacaagacagacttgcaaaagaaggcatgcacagctcagcactgctctgttgcctggtcctcctgactggggtgagggccgaggtgcagctgcagcagtccggagctgagctggtgaggcctggaacctccgtgaaactgagttgtaaagtgagcggagacacaattaccttttactatatgcacttcgtgaagcagaggcctgggcagggactggagtggatcggaaggattgaccccgaggacgaatccaccaaatactccgagaagttcaagaacaaggccaccctcaccgccgacacatcttctaacaccgcatatctgaagctgtcctccctgacctccgaagatactgctacctatttctgcatctacggcggctactacttcgactactggggacagggcgtgatggtgacagtgtctagcgctaaaacaacagccccatcggtctatccactggcccctgtgtgtggagatacaactggctcctcggtgactctaggatgcctggtcaagggttatttccctgagccagtgaccttgacctggaactctggatccctgtccagtggtgtgcacaccttcccagctgtcctgcagtctgacctctacaccctcagcagctcagtgactgtaacctcgagcacctggcccagccagtccatcacctgcaatgtggcccacccggcaagcagcaccaaggtggacaagaaaattgagcccagagggcccacaatcaagccctgtcctccatgcaaatgcccagcacctaacctcttgggtggaccatccgtcttcatcttccctccaaagatcaaggatgtactcatgatctccctgagccccatagtcacatgtgtggtggtggatgtgagcgaggatgacccagatgtccagatcagctggtttgtgaacaacgtggaagtacacacagctcagacacaaacccatagagaggattacaacagtactctccgggtggtcagtgccctccccatccagcaccaggactggatgagtggcaaggagttcaaatgcaaggtcaacaacaaagacctcccagcgcccatcgagagaaccatctcaaaacccaaagggtcagtaagagctccacaggtatatgtcttgcctccaccagaagaagagatgactaagaaacaggtcactctgacctgcatggtcacagacttcatgcctgaagacatttacgtggagtggaccaacaacgggaaaacagagctaaactacaagaacactgaaccagtcctggactctgatggttcttacttcatgtacagcaagctgagagtggaaaagaagaactgggtggaaagaaatagctactcctgttcagtggtccacgagggtctgcacaatcaccacacgactaagagcttctcccggactccgggtaaatgagtctaga

SEQ ID NO: 1056 - DNA, 744 bp, synthetic construct
  source 1..744: mol_type = other DNA
gcggccgcaaactacaagacagacttgcaaaagaaggcatgcacagctcagcactgctctgttgcctggtcctcctgactggggtgagggccgacatccagatgacccagtccccagcatccctctctacctctctgggagagacagtgaccatccagtgccaggcttccgaggatatttattccggactggcttggtatcaacagaagccaggcaagtccccccagctgctgatttacggagcctctgacctgcaggacggcgtgccttccaggttctccggaagcggatctggaacccagtactctctgaagatcacctccatgcagaccgaggacgaaggcgtgtacttctgccagcagggtctgacatacccaaggaccttcggcggaggtacaaagctggagctgaagagagcagatgctgcaccaactgtatccatcttcccaccatccagtgagcagttaacatctggaggtgcctcagtcgtgtgcttcttgaacaacttctaccccaaagacatcaatgtcaagtggaagattgatggcagtgaacgacaaaatggcgtcctgaacagttggactgatcaggacagcaaagacagcacctacagcatgagcagcaccctcacgttgaccaaggacgagtatgaacgacataacagctatacctgtgaggccactcacaagacatcaacttcacccattgtcaagagcttcaacaggaatgagtgttgattctaga

SEQ ID NO: 1057 - DNA, 1479 bp, synthetic construct
  source 1..1479: mol_type = other DNA
gcggccgcaaactacaagacagacttgcaaaagaaggcatgcacagctcagcactgctctgttgcctggtcctcctgactggggtgagggccggaatgaggacagaggacctgcctaaggctgtggtgtttttggagccccagtggtacagggtgctggaaaaggacagtgtgacactgaagtgccagggagcatacagccctgaggataactccacccagtggtttcataatgagtctctgattagcagccaggcctcctcttacttcattgacgccgcaacagtggatgactccggcgagtataggtgtcagaccaacctgtccaccctgtccgaccctgttcagttggaggtgcacatcggctggctcttgctccaggctcctagatgggtgtttaaggaggaggaccccatccacctgaggtgtcattcctggaaaaacaccgccctgcacaaggtgacctacctgcagaacggcaagggcaggaagtacttccaccacaactccgacttctacatccccaaggccaccctgaaggactccggctcctacttctgcaggggcctggtgggctccaagaacgtgtcctccgagacagtgaacatcaccatcacccagggcctggccgtgcccaccatctcctccttcttcccccccggctaccagggtggtggcggatcaggtgggggaggctctggtggaggcggtagtgacatccagatgacccagtccccatcctccctgtctgcttctgtgggagacagggtgaccatcacctgcagagcttcccaggacatcagaaactacctgaactggtaccagcagaagcccggcaaagcccctaaactgctcatctactacacctctcggctggaatccggcgtgccttccaggttctctggatctggaagcggcacagactacaccctgaccatctcctccctgcagcctgaagattttgctacctactactgccagcagggcaataccctgccctggacctttggtcagggcaccaaagttgaaatcaagggtggtggcggatcaggtgggggaggctctggtggaggcggtagtgaggttcagttggtggagtccggaggaggattggtgcagcctggaggaagtttgaggttgagctgtgccgccagcggatacagttttacaggatacacaatgaactgggtgaggcaggcacctggcaagggactggagtgggtggctctgattaaccccacaaagggcgtgagcacatacaaccagaagttcaaggacaggttcaccatttccgtggacaaaagcaagaacacagcctacctgcagatgaacagcctgagggctgaagatactgctgtgtactactgcgccaggtccggatactacggcgattctgactggtacttcgacgtgtggggccagggaacactggttacagtgagctccggaggacatcatcatcatcaccattgattctaga

SEQ ID NO: 1058 - DNA, 1467 bp, synthetic construct
  source 1..1467: mol_type = other DNA
gcggccgcaaactacaagacagacttgcaaaagaaggcatgcacagctcagcactgctctgttgcctggtcctcctgactggggtgagggccggaatgaggacagaggacctgcctaaggctgtggtgtttttggagccccagtggtacagggtgctggaaaaggacagtgtgacactgaagtgccagggagcatacagccctgaggataactccacccagtggtttcataatgagtctctgattagcagccaggcctcctcttacttcattgacgccgcaacagtggatgactccggcgagtataggtgtcagaccaacctgtccaccctgtccgaccctgttcagttggaggtgcacatcggctggctcttgctccaggctcctagatgggtgtttaaggaggaggaccccatccacctgaggtgtcattcctggaaaaacaccgccctgcacaaggtgacctacctgcagaacggcaagggcaggaagtacttccaccacaactccgacttctacatccccaaggccaccctgaaggactccggctcctacttctgcaggggcctggtgggctccaagaacgtgtcctccgagacagtgaacatcaccatcacccagggcctggccgtgcccaccatctcctccttcttcccccccggctaccagggtggtggcggatcaggtgggggaggctctggtggaggcggtagtcaggttcagctccagcagtcaggagctgagctcgctagaccaggagcttcagttaaaatgtcctgcaaaacaagcggctacacattcaccaggtatacaatgcactgggtgaaacagaggcccggccagggactggagtggatcggatacattaaccccagcaggggctatacaaactacaaccagaaattcaaggacaaggccaccctgaccacagacaaatcctcctccacagcatacatgcagctgtccagcctcacctctgaggactcagcagtgtactattgcgccaggtactacgacgaccactactccctggattactggggccagggaaccacactgaccgtttcttccggtggtggcggatcaggtgggggaggctctggtggaggcggtagtcagatcgtcctcacccagagtccatcctccctctctgcttccctcggagaaaaggtcacaatgacctgccgcgcctcctcttcagtctcatacatgaactggtaccagcagaaacccggcacctcccctaaaaggtggatctacgacacctccaaggtcgccagtggagtgcctgataggttctccggatctggctccggtacttcctactccctgaccatctccagcatggaagctgaggacgccgcaacatactactgccagcagtggtcctccaaccccttgacattcggcgcaggtaccaagctggaactgaagggaggacatcatcatcatcaccattgattctaga

SEQ ID NO: 1059 - DNA, 1098 bp, synthetic construct
  source 1..1098: mol_type = other DNA
gcggccgcaaactacaagacagacttgcaaaagaaggcatgcacagctcagcactgctctgttgcctggtcctcctgactggggtgagggccggaatgaggacagaggacctgcctaaggctgtggtgtttttggagccccagtggtacagggtgctggaaaaggacagtgtgacactgaagtgccagggagcatacagccctgaggataactccacccagtggtttcataatgagtctctgattagcagccaggcctcctcttacttcattgacgccgcaacagtggatgactccggcgagtataggtgtcagaccaacctgtccaccctgtccgaccctgttcagttggaggtgcacatcggctggctcttgctccaggctcctagatgggtgtttaaggaggaggaccccatccacctgaggtgtcattcctggaaaaacaccgccctgcacaaggtgacctacctgcagaacggcaagggcaggaagtacttccaccacaactccgacttctacatccccaaggccaccctgaaggactccggctcctacttctgcaggggcctggtgggctccaagaacgtgtcctccgagacagtgaacatcaccatcacccagggcctggccgtgcccaccatctcctccttcttcccccccggctaccagggtggtggcggatcaggtgggggaggctctggtggaggcggtagtgaggttcagttggtggagtccggaggaggagtggttcagcctggaggaagtttgaggctgagctgtgtggccagcggatacgttcacaagattaacttttacgggtggtacaggcaggcacctggaaaggaaagggagaaggtggctcatatctcaatcggagatcagaccgactacgccgactccgctaagggaagattcaccatcagcagggacgagagtaagaacacagtgtatctgcagatgaacagcctgaggcccgaagatactgctgcctactactgcagagccctgtccagaatctggccatacgactactggggccagggaacactggtgacagtgagtagcggaggacatcatcatcatcaccattgattctaga

SEQ ID NO: 1060 - DNA, 1266 bp, synthetic construct
  source 1..1266: mol_type = other DNA
gcggccgcaaactacaagacagacttgcaaaagaaggcatgcacagctcagcactgctctgttgcctggtcctcctgactggggtgagggcccaggttcagctccaggaaagcggaggaggactcgttcaggctggagattcactcaggatcagctgcagggcatcaggcttgacagtcaacgacctctacatgggctggttccgtcaggctcctggaaaagaaagggagttcgtgggacgcgtgacacctggagataacaccgactacacctactacgtggacagtgtgaagggcaggttcacaatcagcagggattccgccaaaaacaccgtgtacctgcagatgaactccctgaagctggaggacaccgccgtgtacctgtgcgccggcaggaggttcggctcctccgagtgggactactggggccagggcacccaggtgaccgtgtcctccggtggtggcggatcaggtgggggaggctctggtggaggcggtagtgacatccagatgacccagtccccatcctccctgtctgcttctgtgggagacagggtgaccatcacctgcagagcttcccaggacatcagaaactacctgaactggtaccagcagaagcccggcaaagcccctaaactgctcatctactacacctctcggctggaatccggcgtgccttccaggttctctggatctggaagcggcacagactacaccctgaccatctcctccctgcagcctgaagattttgctacctactactgccagcagggcaataccctgccctggacctttggtcagggcaccaaagttgaaatcaagggtggtggcggatcaggtgggggaggctctggtggaggcggtagtgaggttcagttggtggagtccggaggaggattggtgcagcctggaggaagtttgaggttgagctgtgccgccagcggatacagttttacaggatacacaatgaactgggtgaggcaggcacctggcaagggactggagtgggtggctctgattaaccccacaaagggcgtgagcacatacaaccagaagttcaaggacaggttcaccatttccgtggacaaaagcaagaacacagcctacctgcagatgaacagcctgagggctgaagatactgctgtgtactactgcgccaggtccggatactacggcgattctgactggtacttcgacgtgtggggccagggaacactggttacagtgagctccggaggacatcatcatcatcaccattgattctaga

SEQ ID NO: 1061 - DNA, 1869 bp, synthetic construct
  source 1..1869: mol_type = other DNA
gcggccgcaaactacaagacagacttgcaaaagaaggcatgcacagctcagcactgctctgttgcctggtcctcctgactggggtgagggccgaggttcagttggtggagtccggaggaggattggtgcagcctggaaacagcttgaggttgagctgtgcagcaagcgggtttacctttagtagttttggaatgagctgggtgaggcaggcacctggaaagggattggagtgggtgagcagcatcagtggcagtggaagcgatacactgtacgctgatagtgtgaagggcaggtttacaattagcagggacaacgctaagacaaccctgtacctgcagatgaacagcctgaggcccgaagatactgctgtgtactactgtaccatcggcggctctttgagtaggagcagccagggaaccctggtgacagtttccagcggtggtggcggatcaggtgggggaggctctggtggaggcggtagtggaatgaggacagaggacctgcctaaggctgtggtgtttttggagccccagtggtacagggtgctggaaaaggacagtgtgacactgaagtgccagggagcatacagccctgaggataactccacccagtggtttcataatgagtctctgattagcagccaggcctcctcttacttcattgacgccgcaacagtggatgactccggcgagtataggtgtcagaccaacctgtccaccctgtccgaccctgttcagttggaggtgcacatcggctggctcttgctccaggctcctagatgggtgtttaaggaggaggaccccatccacctgaggtgtcattcctggaaaaacaccgccctgcacaaggtgacctacctgcagaacggcaagggcaggaagtacttccaccacaactccgacttctacatccccaaggccaccctgaaggactccggctcctacttctgcaggggcctggtgggctccaagaacgtgtcctccgagacagtgaacatcaccatcacccagggcctggccgtgcccaccatctcctccttcttcccccccggctaccagggtggtggcggatcaggtgggggaggctctggtggaggcggtagtgacatccagatgacccagtccccatcctccctgtctgcttctgtgggagacagggtgaccatcacctgcagagcttcccaggacatcagaaactacctgaactggtaccagcagaagcccggcaaagcccctaaactgctcatctactacacctctcggctggaatccggcgtgccttccaggttctctggatctggaagcggcacagactacaccctgaccatctcctccctgcagcctgaagattttgctacctactactgccagcagggcaataccctgccctggacctttggtcagggcaccaaagttgaaatcaagggtggtggcggatcaggtgggggaggctctggtggaggcggtagtgaggttcagttggtggagtccggaggaggattggtgcagcctggaggaagtttgaggttgagctgtgccgccagcggatacagttttacaggatacacaatgaactgggtgaggcaggcacctggcaagggactggagtgggtggctctgattaaccccacaaagggcgtgagcacatacaaccagaagttcaaggacaggttcaccatttccgtggacaaaagcaagaacacagcctacctgcagatgaacagcctgagggctgaagatactgctgtgtactactgcgccaggtccggatactacggcgattctgactggtacttcgacgtgtggggccagggaacactggttacagtgagctccggaggacatcatcatcatcaccattgattctaga

SEQ ID NO: 1062 - DNA, 1419 bp, synthetic construct
  source 1..1419: mol_type = other DNA
gcggccgcaaactacaagacagacttgcaaaagaaggcatgcacagctcagcactgctctgttgcctggtcctcctgactggggtgagggccggaatgaggacagaggacctgcctaaggctgtggtgtttttggagccccagtggtacagggtgctggaaaaggacagtgtgacactgaagtgccagggagcatacagccctgaggataactccacccagtggtttcataatgagtctctgattagcagccaggcctcctcttacttcattgacgccgcaacagtggatgactccggcgagtataggtgtcagaccaacctgtccaccctgtccgaccctgttcagttggaggtgcacatcggctggctcttgctccaggctcctagatgggtgtttaaggaggaggaccccatccacctgaggtgtcattcctggaaaaacaccgccctgcacaaggtgacctacctgcagaacggcaagggcaggaagtacttccaccacaactccgacttctacatccccaaggccaccctgaaggactccggctcctacttctgcaggggcctggtgggctccaagaacgtgtcctccgagacagtgaacatcaccatcacccagggcctggccgtgcccaccatctcctccttcttcccccccggctaccagggtggtggcggatcaggtgggggaggctctggtggaggcggtagtgagcctaaatcctccgataagacccatacctgccctccttgcccagctcctgaagctgctgggggaccgtcagtcttcctcttccccccaaaacccaaggacaccctcatgatctcccggacccccgaggtcacatgcgtggtggtggacgtgagccacgaagaccctgaggtcaagttcaactggtacgtggacggcgtggaggtgcataatgccaagacaaagccgcgggaggagcagtacaacagcacgtaccgtgtggtcagcgtcctcaccgtcctgcaccaggactggctgaatggcaaggagtacaagtgcaaggtctccaacaaagccctcgctgcccccatcgagaaaaccatctccaaagccaaagggcagccccgagaaccacaggtgtacaccctgcccccatcccgggacgagctgaccaagaaccaggtcagcctgagctgcgccgtcaaaggcttctatcccagcgacatcgccgtggagtgggagagcaatgggcagccggagaacaactacaagaccacgcctcccgtgctggactccgacggctccttcttcctcgtgagcaagctcaccgtggacaagagcaggtggcagcaggggaacgtcttctcatgctccgtgatgcatgaggctctgcacaaccactacacgcagaagagcctctccctgtctccgggtaaatgattctaga

SEQ ID NO: 1063 - DNA, 1467 bp, synthetic construct
  source 1..1467: mol_type = other DNA
gcggccgcaaactacaagacagacttgcaaaagaaggcatgcacagctcagcactgctctgttgcctggtcctcctgactggggtgagggccgaggttcagttggtggagtccggaggaggattggtgcagcctggaggaagtttgaagttgagctgtgccgcctccggatttacatttaacaagtatgcaatgaactgggtgaggcaggcacctggaaagggattggagtgggtggctaggattaggagcaagtacaacaactacgccacatactacgccgacagtgtgaaggacaggttcaccatctccagggatgattcaaagaacaccgcctacttgcagatgaacaacctgaaaactgaagataccgccgtctactactgcgtgaggcacggaaactttggaaactcctacatctcctactgggcctactggggccagggaaccctggtgaccgtgtcctccgctagcaccaagggcccatcggtcttccccctggcaccctcctccaagagcacctctgggggcacagcggccctgggctgcctggtcaaggactacttccccgaaccggtgacggtgtcgtggaactcaggcgccctgaccagcggcgtgcacaccttcccggctgtcctacagtcctcaggactctactccctcagcagcgtggtgaccgtgccctccagcagcttgggcacccagacctacatctgcaacgtgaatcacaagcccagcaacaccaaggtggacaagaaagttgagcccaaatcttgtgacaaaactcacacatgcccaccgtgcccagcacctgaagccgcagggggaccgtcagtcttcctcttccccccaaaacccaaggacaccctcatgatctcccggacccccgaggtcacatgcgtggtggtggacgtgagccacgaagaccctgaggtcaagttcaactggtacgtggacggcgtggaggtgcataatgccaagacaaagccgcgggaggagcagtacaacagcacgtaccgtgtggtcagcgtcctcaccgtcctgcaccaggactggctgaatggcaaggagtacaagtgcaaggtctccaacaaagccctcgctgcccccatcgagaaaaccatctccaaagccaaagggcagccccgagaaccacaggtgtacaccctgcccccatcccgggacgagctgaccaagaaccaggtcagcctgtggtgcctggtcaaaggcttctatcccagcgacatcgccgtggagtgggagagcaatgggcagccggagaacaactacaagaccacgcctcccgtgctggactccgacggctccttcttcctctacagcaagctcaccgtggacaagagcaggtggcagcaggggaacgtcttctcatgctccgtgatgcatgaggctctgcacaaccactacacgcagaagagcctctccctgtctccgggtaaatgattctaga

SEQ ID NO: 1064 - DNA, 747 bp, synthetic construct
  source 1..747: mol_type = other DNA
gcggccgcaaactacaagacagacttgcaaaagaaggcatgcacagctcagcactgctctgttgcctggtcctcctgactggggtgagggcccagacagtcgtgacccaggaaccatccctgaccgtttcccctggaggaacagtgaccctcacctgtggaagctccaccggagctgttacctccggaaactaccccaactgggtccagcagaaacccggacaggcacctagaggtctgatcggaggaaccaaatttctggcccccggcacacctgctcgattttccggatctctgctgggcggaaaagccgctttgactctgagcggagtgcagcctgaggacgaagctgaatactactgcgtgctgtggtactccaacaggtgggtgttcggaggcggaactaagctgaccgtgctgtcccagcctaaagccgcaccttcagtcactctgttcccgccctcctctgaggagctccaagccaacaaggccacactagtgtgtctggtgagtgacttctacccgggagctgtgacagtggcctggaaggcagatggcagccccgtcaaggtgggagtggagaccaccaaaccctccaaacagagcaacaacaagtacgcggccagcagctacctgagcctgacgcccgagcagtggaagtcccacagaagctacagctgcagggtcacgcatgaagggagcaccgtggagaagacagtggcccctgctgaatgttcttgattctaga

SEQ ID NO: 1065 - DNA, 1434 bp, synthetic construct
  source 1..1434: mol_type = other DNA
gcggccgcaaactacaagacagacttgcaaaagaaggcatgcacagctcagcactgctctgttgcctggtcctcctgactggggtgagggccggaatgaggacagaggacctgcctaaggctgtggtgtttttggagccccagtggtacagggtgctggaaaaggacagtgtgacactgaagtgccagggagcatacagccctgaggataactccacccagtggtttcataatgagtctctgattagcagccaggcctcctcttacttcattgacgccgcaacagtggatgactccggcgagtataggtgtcagaccaacctgtccaccctgtccgaccctgttcagttggaggtgcacatcggctggctcttgctccaggctcctagatgggtgtttaaggaggaggaccccatccacctgaggtgtcattcctggaaaaacaccgccctgcacaaggtgacctacctgcagaacggcaagggcaggaagtacttccaccacaactccgacttctacatccccaaggccaccctgaaggactccggctcctacttctgcaggggcctggtgggctccaagaacgtgtcctccgagacagtgaacatcaccatcacccagggcggtggtggcggatcaggtgggggaggctctggtggaggcggtagtgacatccagatgacccagtccccatcctccctgtctgcttctgtgggagacagggtgaccatcacctgcagagcttcccaggacatcagaaactacctgaactggtaccagcagaagcccggcaaagcccctaaactgctcatctactacacctctcggctggaatccggcgtgccttccaggttctctggatctggaagcggcacagactacaccctgaccatctcctccctgcagcctgaagattttgctacctactactgccagcagggcaataccctgccctggacctttggtcagggcaccaaagttgaaatcaagggtggtggcggatcaggtgggggaggctctggtggaggcggtagtgaggttcagttggtggagtccggaggaggattggtgcagcctggaggaagtttgaggttgagctgtgccgccagcggatacagttttacaggatacacaatgaactgggtgaggcaggcacctggcaagggactggagtgggtggctctgattaaccccacaaagggcgtgagcacatacaaccagaagttcaaggacaggttcaccatttccgtggacaaaagcaagaacacagcctacctgcagatgaacagcctgagggctgaagatactgctgtgtactactgcgccaggtccggatactacggcgattctgactggtacttcgacgtgtggggccagggaacactggttacagtgagctccggaggacatcatcatcatcaccattgattctaga

SEQ ID NO: 1066 - DNA, 1476 bp, synthetic construct
  source 1..1476: mol_type = other DNA
gcggccgcaaactacaagacagacttgcaaaagaaggcatgcacagctcagcactgctctgttgcctggtcctcctgactggggtgagggccggaatgaggacagaggacctgcctaaggctgtggtgtttttggagccccagtggtacagggtgctggagaaggacagcgtgaccctgaagtgccagggagcatacagccctgaggataactccacccagtggtttcacaatgagtccctgatctcctctcaggcctccagctacttcattgacgccgcaaccgtggacgactccggtgaatacaggtgtcagaccaatctgtccaccctctccgaccccgtgcagttggaagtccacatcggctggctcctgctccaggctcctagatgggtgtttaaggaagaggaccccatccacctccgctgtcactcttggaaaaacaccgccctgcacaaggtgacctacctgcagaacggcaagggcaggaagtacttccaccacaactccgacttctacatccccaaggccaccctgaaggactccggctcctacttctgcaggggcatgggcaagcacaggtactcctccgagacagtgaacatcaccatcacccagggcctggccgtgcccaccatctcctccttcttcccccccggctaccagggtggtggcggatcaggtgggggaggctctggtggaggcggtagtgacatccagatgacccagtccccatcctccctgtctgcttctgtgggagacagggtgaccatcacctgcagagcttcccaggacatcagaaactacctgaactggtaccagcagaagcccggcaaagcccctaaactgctcatctactacacctctcggctggaatccggcgtgccttccaggttctctggatctggaagcggcacagactacaccctgaccatctcctccctgcagcctgaagattttgctacctactactgccagcagggcaataccctgccctggacctttggtcagggcaccaaagttgaaatcaagggtggtggcggatcaggtgggggaggctctggtggaggcggtagtgaggttcagttggtggagtccggaggaggattggtgcagcctggaggaagtttgaggttgagctgtgccgccagcggatacagttttacaggatacacaatgaactgggtgaggcaggcacctggcaagggactggagtgggtggctctgattaaccccacaaagggcgtgagcacatacaaccagaagttcaaggacaggttcaccatttccgtggacaaaagcaagaacacagcctacctgcagatgaacagcctgagggctgaagatactgctgtgtactactgcgccaggtccggatactacggcgattctgactggtacttcgacgtgtggggccagggaacactggttacagtgagctccggaggacatcatcatcatcaccattgattctaga

SEQ ID NO: 1067 - DNA, 1407 bp, synthetic construct
  source 1..1407: mol_type = other DNA
gcggccgcaaactacaagacagacttgcaaaagaaggcatgcacagctcagcactgctctgttgcctggtcctcctgactggggtgagggccaaggcagtgatcaccctgcagcccccctgggtttctgtgttccaggaggagacagtgaccctgcactgcgaggtgctgcacttgccaggatcaagcagcacccagtggttcctgaacggaacagccacccagacctccaccccttcttaccgtatcaccagcgcaagcgtgaatgactccggcgagtacaggtgccagaggggattgtccgggaggtctgaccctatccagctggagatccacaggggatggctgctgttgcaggtgtcctccagagtgtttacagagggagagcccctggcactcaggtgtcatgcttggaaggacaagttggtttacaacgtgctgtattataggaacggaaaggctttcaagttcttccattggaactccaatttgaccattttgaaaactaatatttctcataacggaacctaccactgctccggcatgggcaaacacaggtacacctccgccggtatctctgtcaccgtcaaggaactgggtggtggcggatcaggtgggggaggctctggtggaggcggtagtgacatccagatgacccagtccccatcctccctgtctgcttctgtgggagacagggtgaccatcacctgcagagcttcccaggacatcagaaactacctgaactggtaccagcagaagcccggcaaagcccctaaactgctcatctactacacctctcggctggaatccggcgtgccttccaggttctctggatctggaagcggcacagactacaccctgaccatctcctccctgcagcctgaagattttgctacctactactgccagcagggcaataccctgccctggacctttggtcagggcaccaaagttgaaatcaagggtggtggcggatcaggtgggggaggctctggtggaggcggtagtgaggttcagttggtggagtccggaggaggattggtgcagcctggaggaagtttgaggttgagctgtgccgccagcggatacagttttacaggatacacaatgaactgggtgaggcaggcacctggcaagggactggagtgggtggctctgattaaccccacaaagggcgtgagcacatacaaccagaagttcaaggacaggttcaccatttccgtggacaaaagcaagaacacagcctacctgcagatgaacagcctgagggctgaagatactgctgtgtactactgcgccaggtccggatactacggcgattctgactggtacttcgacgtgtggggccagggaacactggttacagtgagctccggaggacatcatcatcatcaccattgattctaga

SEQ ID NO: 1068 - DNA, 1452 bp, synthetic construct
  source 1..1452: mol_type = other DNA
gcggccgcaaactacaagacagacttgcaaaagaaggcatgcacagctcagcactgctctgttgcctggtcctcctgactggggtgagggccgctgctcctcctaaagctgtgttgaagttggaacccccctggattaatgttctgcaggaggattctgtgaccctgacttgtcagggcgcccgatctcctgagtccgattctattcagtggtttcacaacgggaatttgatccccactcatacccagccttcctaccgttttaaggccaacaacaatgactctggcgagtacacctgtcagaccggccagacatccctctccgaccctgttcacctgaccgtcctctccgaatggctcgtgctccagacccctcacctggaatttcaggaaggcgagacaattatgctgcgctgtcactcctggaaggacaagcccctcgtgaaggtgaccttcttccagaatggcaagtctcagaagttttcccacctcgaccccaccttctccatccctcaggctaaccactcccattccggcgactaccactgcaccggaaacatcggctacaccctgttctcctccaagcccgtcaccatcaccgtccaggtcccttctatgggctcctcctcccctatgggcatcggtggtggcggatcaggtgggggaggctctggtggaggcggtagtgacatccagatgacccagtccccatcctccctgtctgcttctgtgggagacagggtgaccatcacctgcagagcttcccaggacatcagaaactacctgaactggtaccagcagaagcccggcaaagcccctaaactgctcatctactacacctctcggctggaatccggcgtgccttccaggttctctggatctggaagcggcacagactacaccctgaccatctcctccctgcagcctgaagattttgctacctactactgccagcagggcaataccctgccctggacctttggtcagggcaccaaagttgaaatcaagggtggtggcggatcaggtgggggaggctctggtggaggcggtagtgaggttcagttggtggagtccggaggaggattggtgcagcctggaggaagtttgaggttgagctgtgccgccagcggatacagttttacaggatacacaatgaactgggtgaggcaggcacctggcaagggactggagtgggtggctctgattaaccccacaaagggcgtgagcacatacaaccagaagttcaaggacaggttcaccatttccgtggacaaaagcaagaacacagcctacctgcagatgaacagcctgagggctgaagatactgctgtgtactactgcgccaggtccggatactacggcgattctgactggtacttcgacgtgtggggccagggaacactggttacagtgagctccggaggacatcatcatcatcaccattgattctaga

SEQ ID NO: 1069 - DNA, 816 bp, synthetic construct
  source 1..816: mol_type = other DNA
gcggccgcaaactacaagacagacttgcaaaagaaggcatgcacagctcagcactgctctgttgcctggtcctcctgactggggtgagggccgaggttcagttggtggagtccggaggaggattggtgcagcctggaggaagtttgaggttgagctgtgccgccagcggatacagttttacaggatacacaatgaactgggtgaggcaggcacctggcaagggactggagtgggtggctctgattaaccccacaaagggcgtgagcacatacaaccagaagttcaaggacaggttcaccatttccgtggacaaaagcaagaacacagcctacctgcagatgaacagcctgagggctgaagatactgctgtgtactactgcgccaggtccggatactacggcgattctgactggtacttcgacgtgtggggccagggaacactggttacagtgagctccgctagcaccaagggcccatcggtcttccccctggcaccctcctccaagagcacctctgggggcacagcggccctgggctgcctggtcaaggactacttccccgaaccggtgacggtgtcgtggaactcaggcgccctgaccagcggcgtgcacaccttcccggctgtcctacagtcctcaggactctactccctcagcagcgtggtgaccgtgccctccagcagcttgggcacccagacctacatctgcaacgtgaatcacaagcccagcaacaccaaggtggacaagaaagttgagcccaaatcttctgacaagacccacaccggaggacatcatcatcatcaccattgattctaga

SEQ ID NO: 1070 - DNA, 1365 bp, synthetic construct
  source 1..1365: mol_type = other DNA
gcggccgcaaactacaagacagacttgcaaaagaaggcatgcacagctcagcactgctctgttgcctggtcctcctgactggggtgagggccgacatccagatgacccagtccccatcctccctgtctgcttctgtgggagacagggtgaccatcacctgcagagcttcccaggacatcagaaactacctgaactggtaccagcagaagcccggcaaagcccctaaactgctcatctactacacctctcggctggaatccggcgtgccttccaggttctctggatctggaagcggcacagactacaccctgaccatctcctccctgcagcctgaagattttgctacctactactgccagcagggcaataccctgccctggacctttggtcagggcaccaaagttgaaatcaagcgtacggtggctgcaccatctgtcttcatcttcccgccatctgatgagcagttgaaatctggaactgcctctgttgtgtgcctgctgaataacttctatcccagagaggccaaagtacagtggaaggtggataacgccctccaatcgggtaactcccaggagagtgtcacagagcaggacagcaaggacagcacctacagcctcagcagcaccctgacgctgagcaaagcagactacgagaaacacaaagtctacgcctgcgaagtcacccatcagggcctgagttcgcccgtcacaaagagcttcaacaggggagagtctggtggtggcggatcaggtgggggaggctctggtggaggcggtagtggaatgaggacagaggacctgcctaaggctgtggtgtttttggagccccagtggtacagggtgctggaaaaggacagtgtgacactgaagtgccagggagcatacagccctgaggataactccacccagtggtttcataatgagtctctgattagcagccaggcctcctcttacttcattgacgccgcaacagtggatgactccggcgagtataggtgtcagaccaacctgtccaccctgtccgaccctgttcagttggaggtgcacatcggctggctcttgctccaggctcctagatgggtgtttaaggaggaggaccccatccacctgaggtgtcattcctggaaaaacaccgccctgcacaaggtgacctacctgcagaacggcaagggcaggaagtacttccaccacaactccgacttctacatccccaaggccaccctgaaggactccggctcctacttctgcaggggcctggtgggctccaagaacgtgtcctccgagacagtgaacatcaccatcacccagggcctggccgtgcccaccatctcctccttcttcccccccggctaccagtgattctaga

SEQ ID NO: 1071 - DNA, 1437 bp, synthetic construct
  source 1..1437: mol_type = other DNA
gcggccgcaaactacaagacagacttgcaaaagaaggcatgcacagctcagcactgctctgttgcctggtcctcctgactggggtgagggccgaggttcagttggtggagtccggaggaggattggtgcagcctggaggaagtttgaggttgagctgtgccgccagcggatacagttttacaggatacacaatgaactgggtgaggcaggcacctggcaagggactggagtgggtggctctgattaaccccacaaagggcgtgagcacatacaaccagaagttcaaggacaggttcaccatttccgtggacaaaagcaagaacacagcctacctgcagatgaacagcctgagggctgaagatactgctgtgtactactgcgccaggtccggatactacggcgattctgactggtacttcgacgtgtggggccagggaacactggttacagtgagctccgctagcaccaagggcccatcggtcttccccctggcaccctcctccaagagcacctctgggggcacagcggccctgggctgcctggtcaaggactacttccccgaaccggtgacggtgtcgtggaactcaggcgccctgaccagcggcgtgcacaccttcccggctgtcctacagtcctcaggactctactccctcagcagcgtggtgaccgtgccctccagcagcttgggcacccagacctacatctgcaacgtgaatcacaagcccagcaacaccaaggtggacaagaaagttgagcccaaatcttctgacaagacccacaccggtggtggcggatcaggtgggggaggctctggtggaggcggtagtggaatgaggacagaggacctgcctaaggctgtggtgtttttggagccccagtggtacagggtgctggaaaaggacagtgtgacactgaagtgccagggagcatacagccctgaggataactccacccagtggtttcataatgagtctctgattagcagccaggcctcctcttacttcattgacgccgcaacagtggatgactccggcgagtataggtgtcagaccaacctgtccaccctgtccgaccctgttcagttggaggtgcacatcggctggctcttgctccaggctcctagatgggtgtttaaggaggaggaccccatccacctgaggtgtcattcctggaaaaacaccgccctgcacaaggtgacctacctgcagaacggcaagggcaggaagtacttccaccacaactccgacttctacatccccaaggccaccctgaaggactccggctcctacttctgcaggggcctggtgggctccaagaacgtgtcctccgagacagtgaacatcaccatcacccagggcctggccgtgcccaccatctcctccttcttcccccccggctaccagggaggacatcatcatcatcaccattgattctaga

SEQ ID NO: 1072 - DNA, 1290 bp, synthetic construct
  source 1..1290: mol_type = other DNA
gcggccgcaaactacaagacagacttgcaaaagaaggcatgcacagctcagcactgctctgttgcctggtcctcctgactggggtgagggcccaggttcagctccaggagtcaggcggaggactcgttcaggctggaggatcactcaggctctcctgcgctgtctccggtaacaccctctccagatacgctatgggttggttcaggcagacacccggcaacgagagggagtttgtggctgctattcggtggaacaacggcgccacctattatgccgactccgtggaaggcaggttcaccatctccagggacagtggcaagaacaccgtgtacctgcagatgaacaacctgaagcccgaggacacagccgtctactactgtgccggcaggttcctggggtacgcaagtagtaacgcataccacgaggccctgtacaactacgactattggggccaggggacccaggtgacagtgtctagtggtggtggcggatcaggtgggggaggctctggtggaggcggtagtgacatccagatgacccagtccccatcctccctgtctgcttctgtgggagacagggtgaccatcacctgcagagcttcccaggacatcagaaactacctgaactggtaccagcagaagcccggcaaagcccctaaactgctcatctactacacctctcggctggaatccggcgtgccttccaggttctctggatctggaagcggcacagactacaccctgaccatctcctccctgcagcctgaagattttgctacctactactgccagcagggcaataccctgccctggacctttggtcagggcaccaaagttgaaatcaagggtggtggcggatcaggtgggggaggctctggtggaggcggtagtgaggttcagttggtggagtccggaggaggattggtgcagcctggaggaagtttgaggttgagctgtgccgccagcggatacagttttacaggatacacaatgaactgggtgaggcaggcacctggcaagggactggagtgggtggctctgattaaccccacaaagggcgtgagcacatacaaccagaagttcaaggacaggttcaccatttccgtggacaaaagcaagaacacagcctacctgcagatgaacagcctgagggctgaagatactgctgtgtactactgcgccaggtccggatactacggcgattctgactggtacttcgacgtgtggggccagggaacactggttacagtgagctccggaggacatcatcatcatcaccattgattctaga

SEQ ID NO: 1073 - DNA, 810 bp, synthetic construct
  source 1..810: mol_type = other DNA
gcggccgcaaactacaagacagacttgcaaaagaaggcatgcacagctcagcactgctctgttgcctggtcctcctgactggggtgagggccgaagtgcagctgcagcagagcggagcagagttggtgaagccaggagcaagcgtgaagctgagctgcacaggaagcggattcaacatcaaggacacatacatctactggctgaagcagaggcccgagcagggattggagtggattggacggattgaccccgccaatggagacaccgaatacgaccccaagttccagggcaaagccacaatcagggccgacacaagttccaacacagcatacttgcagctgagctccctgaccagcgacgacacagtcgtgtactattgcgccaggaagtatggcaacaatagggcctggttcgccttctggggacagggaacactggtgacagtgtccgccgctagcaccaagggcccatcggtcttccccctggcaccctcctccaagagcacctctgggggcacagcggccctgggctgcctggtcaaggactacttccccgaaccggtgacggtgtcgtggaactcaggcgccctgaccagcggcgtgcacaccttcccggctgtcctacagtcctcaggactctactccctcagcagcgtggtgaccgtgccctccagcagcttgggcacccagacctacatctgcaacgtgaatcacaagcccagcaacaccaaggtggacaagaaagttgagcccaaatcttctgacaagacccacaccggaggacatcatcatcatcaccattgattctaga

SEQ ID NO: 1074 - DNA, 1521 bp, synthetic construct
  source 1..1521: mol_type = other DNA
gcggccgcaaactacaagacagacttgcaaaagaaggcatgcacagctcagcactgctctgttgcctggtcctcctgactggggtgagggcccagatcgtcatgacccagacccccaaattcctcctcgtctccgccggagacagagtcacaatcacctgcaaggcctcccagtccgtctccgatgacgtggcttggtaccagcagaaacccggccagtcccctaaactcctcatctacttcgcctcatacagatacaccggcgttcccgacagattcacaggaagcggctacgggaccgactttaccttcactatctcctccgtgcaggctgacgacctcgctgtttacttctgccagcaggactactcctcccccctgacattcggcgctggaacaaaggtggagctgaagcgtacggtggctgcaccatctgtcttcatcttcccgccatctgatgagcagttgaaatctggaactgcctctgttgtgtgcctgctgaataacttctatcccagagaggccaaagtacagtggaaggtggataacgccctccaatcgggtaactcccaggagagtgtcacagagcaggacagcaaggacagcacctacagcctcagcagcaccctgacgctgagcaaagcagactacgagaaacacaaagtctacgcctgcgaagtcacccatcagggcctgagttcgcccgtcacaaagagcttcaacaggggagagtctggtggtggcggatcaggtgggggaggctctggtggaggcggtagtgacatccagatgacccagtccccatcctccctgtctgcttctgtgggagacagggtgaccatcacctgcagagcttcccaggacatcagaaactacctgaactggtaccagcagaagcccggcaaagcccctaaactgctcatctactacacctctcggctggaatccggcgtgccttccaggttctctggatctggaagcggcacagactacaccctgaccatctcctccctgcagcctgaagattttgctacctactactgccagcagggcaataccctgccctggacctttggtcagggcaccaaagttgaaatcaagggtggtggcggatcaggtgggggaggctctggtggaggcggtagtgaggttcagttggtggagtccggaggaggattggtgcagcctggaggaagtttgaggttgagctgtgccgccagcggatacagttttacaggatacacaatgaactgggtgaggcaggcacctggcaagggactggagtgggtggctctgattaaccccacaaagggcgtgagcacatacaaccagaagttcaaggacaggttcaccatttccgtggacaaaagcaagaacacagcctacctgcagatgaacagcctgagggctgaagatactgctgtgtactactgcgccaggtccggatactacggcgattctgactggtacttcgacgtgtggggccagggaacactggttacagtgagctcctgattctaga

SEQ ID NO: 1075 - DNA, 1419 bp, synthetic construct
  source 1..1419: mol_type = other DNA
gcggccgcaaactacaagacagacttgcaaaagaaggcatgcacagctcagcactgctctgttgcctggtcctcctgactggggtgagggccgctcctcctaaggctgtgttgaagctggagccccagtggattaacgttctgcaggaagattccgttaccctcacttgtcgaggtacccactcccccgagtccgattctattcagtggtttcacaacggcaatttgatccccacccacacccagccctcctacagattcaaggccaacaacaacgactccggcgagtatacatgccagaccggccagaccagcctgtctgatcctgtgcacctcaccgtcctctccgaatggctcgtgctccagacccctcacctggaatttcaggaaggcgaaaccatcgtgctgaggtgtcactcctggaaggacaagcccctggtgaaagttaccttcttccagaatggcaagtctaaaaagttctccaggtccgaccccaacttctccatcccccaggccaaccactcccactccggcgactaccactgcaccggcaacatcggctacaccctgtactcctccaagcccgtgaccatcaccgtgcaggcccccggtggtggcggatcaggtgggggaggctctggtggaggcggtagtgacatccagatgacccagtccccatcctccctgtctgcttctgtgggagacagggtgaccatcacctgcagagcttcccaggacatcagaaactacctgaactggtaccagcagaagcccggcaaagcccctaaactgctcatctactacacctctcggctggaatccggcgtgccttccaggttctctggatctggaagcggcacagactacaccctgaccatctcctccctgcagcctgaagattttgctacctactactgccagcagggcaataccctgccctggacctttggtcagggcaccaaagttgaaatcaagggtggtggcggatcaggtgggggaggctctggtggaggcggtagtgaggttcagttggtggagtccggaggaggattggtgcagcctggaggaagtttgaggttgagctgtgccgccagcggatacagttttacaggatacacaatgaactgggtgaggcaggcacctggcaagggactggagtgggtggctctgattaaccccacaaagggcgtgagcacatacaaccagaagttcaaggacaggttcaccatttccgtggacaaaagcaagaacacagcctacctgcagatgaacagcctgagggctgaagatactgctgtgtactactgcgccaggtccggatactacggcgattctgactggtacttcgacgtgtggggccagggaacactggttacagtgagctccggaggacatcatcatcatcaccattgattctaga

SEQ ID NO: 1076 - DNA, 810 bp, synthetic construct
  source 1..810: mol_type = other DNA
gcggccgcaaactacaagacagacttgcaaaagaaggcatgcacagctcagcactgctctgttgcctggtcctcctgactggggtgagggccgaggttcagttgcagcagagcggagcagagttggtgaagccaggagcaagcgtgaagttgagttgcaccggaagcggattcaacattaaggacacctatatctactggctgaagcagaggcccgaacagggattggagtggattggaaggattgaccccgccaacggagatacagagtacgaccctaagttccagggcaaagccaccattcgggccgatacaagttccaacacagcatacctgcagttgtctagcctgaccagcgacgacaccgtcgtttactattgcgccaggaagtatggcaacaatagagcatggtttgccttctggggacagggcacactcgtgaccgtttctgctgcttctaccaaaggaccctccgtttttcccctggcctcctcctccaaatccacctccggaggaaccgctgctctgggatgcctggtgaaagattattttcccgagcccgtgaccgtttcctggaactccggagctctgacctccggagttcacacatgccctgctgtcctgcagtctagtggcttgtactccctgtcctccgtggtgacagtgccttcttcctccctgggaacccagacatacatctgtaacgttaaccacgaaccctccaacaccaaagtggataaaaaggtggagcccaagtcctccgacaagacccacaccggaggacaccatcaccatcatcactgattctaga

SEQ ID NO: 1077 - DNA, 1511 bp, synthetic construct
  source 1..1511: mol_type = other DNA
gcggccgcaaactacaagacagacttgcaaaagaaggcatgcacagctcagcactgctctgttgcctggtcctcctgactggggtgagggcccagatcgtcatgacccagaccccaaaatccctcctcgtctccgctggagacagagttaccatcacctgcaaggcctcccagtccgtttccgatgacgtggcttggtaccagcagaaacccggacagtccccaaaactcctcatctacttcgcctcctataggtatacaggcgtccccgacagattcaccggatctggatacggcaccgacttcaccctgaccatctccagtgtgcaggccgatgacgctgcagtttactactgccagcaggactactcctcccccttgacatttggcgcaggcacaaaagttgagctgaagaggacagtggcagcacctagtgtgttcatcttccccccctccgacgaacagctgaagtcaggaaccgcaagcgtggtgtgcttgctgaacaacttctaccccagggaagccaaagtgcagtggaaagtggataacgccctgcagagcggcaactctcaggaatctgtgaccgagcaggactccaaggactctacctattccctctgctccaccctgaccctgtccaaagcagattacgagaaacacaaagtctacgcctgcgaagtgacccaccagggattgtctagccccgttaccaaatcattcaaccgcggagagtccggtggtggcggatcaggtgggggaggctctggtggaggcggatccgacatccagatgacccagtccccatcctccctgtctgcttctgtgggagacagggtgaccatcacctgcagagcttcccaggacatcagaaactacctgaactggtaccagcagaagcccggcaaagcccctaaactgctcatctactacacctctcggctggaatccggcgtgccttccaggttctctggatctggaagcggcacagactacaccctgaccatctcctccctgcagcctgaagattttgctacctactactgccagcagggcaataccctgccctggacctttggtcagggcaccaaagttgaaatcaagggaggcggtggaagtggcggaggagggtcagggggaggtggatctgaggttcagttggtggagtccggaggaggattggtgcagcctggaggaagtttgaggttgagctgtgccgccagcggatacagttttacaggatacacaatgaactgggtgaggcaggcacctggcaagggactggagtgggtggctctgattaaccccacaaagggcgtgagcacatacaaccagaagttcaaggacaggttcaccatttccgtggacaaaagcaagaacacagcctacctgcagatgaacagcctgagggctgaagatactgctgtgtactactgcgccaggtccggatactacggcgattctgactggtacttcgacgtgtggggccagggaacactggttacagtgagctcc

SEQ ID NO: 1078 - DNA, 791 bp, synthetic construct
  source 1..791: mol_type = other DNA
gcggccgcaaactacaagacagacttgcaaaagaaggcatgcacagctcagcactgctctgttgcctggtcctcctgactggggtgagggcccaggttcagctccagcagcctggagctgaactcgttaaacccggcgcatccgtcaagatgtcctgcaaagcctccggctacaccttcaccaactactggatcaactgggtcaagcagaggcccggacagggactggagtggatcggagacatttaccccggcggaggtatcaccaactacaacgagaaattcaagaccaaggccaccctcaccctggacacatcttccagtacagtgtatatgcagctgtcctccttgacctctgaagattctgctgtgtactactgctcccggtcctacggtaagtacttcgactactggggccagggcaccactttgatcgtctcttccgcttctaccaaaggaccctccgtttttcccctggccccttcctccaagtccacatccggaggaaccgctgctctgggatgtttggtgaaagattatttccccgagcccgtgaccgtttcctggaatagtggcgctctgacctccggagtccacacctgccctgctgtgctgcagtcctccggactgtattctttgtcctccgttgtgaccgtgccctcctcttctttgggcacacagacttacatctgtaacgtcaaccacaaaccctccaacaccaaagtggacaaaaaggtggagcccaagtcctccgacaagacccacaccggaggacaccatcaccatcatcac

SEQ ID NO: 1079 - DNA, 1521 bp, synthetic construct
  source 1..1521: mol_type = other DNA
gcggccgcaaactacaagacagacttgcaaaagaaggcatgcacagctcagcactgctctgttgcctggtcctcctgactggggtgagggccgacatcaagatgacccagtccccctcctccatgtatgcctctgtgggagaaagagtgaccatcacctgcaaggcctcccaggatatcaagtcctacctgacctggtaccagaaaaagccctggaagtcccccaggaccctgatcttctactccaccaggctggccgacggcgtgccctccaggttctccggctccggctccggccaggacttctccctgaccatctcctccctggagtccgacgacaccgccacctactactgcctgcagcacgacgagtcccccttcaccttcggcggcggcaccaagctggagatcaagaggacagtggcagcacctagtgtgttcatcttccccccctccgacgaacagctgaagtcaggaaccgcaagcgtggtgtgcttgctgaacaacttctaccccagggaagccaaagtgcagtggaaagtggataacgccctgcagagcggcaactctcaggaatctgtgaccgagcaggactccaaggactctacctattccctctgctccaccctgaccctgtccaaagcagattacgagaaacacaaagtctacgcctgcgaagtgacccaccagggattgtctagccccgttaccaaatcattcaaccgcggagagtccggtggtggcggatcaggtgggggaggctctggtggaggcggatccgacatccagatgacccagtccccatcctccctgtctgcttctgtgggagacagggtgaccatcacctgcagagcttcccaggacatcagaaactacctgaactggtaccagcagaagcccggcaaagcccctaaactgctcatctactacacctctcggctggaatccggcgtgccttccaggttctctggatctggaagcggcacagactacaccctgaccatctcctccctgcagcctgaagattttgctacctactactgccagcagggcaataccctgccctggacctttggtcagggcaccaaagttgaaatcaagggaggcggtggaagtggcggaggagggtcagggggaggtggatctgaggttcagttggtggagtccggaggaggattggtgcagcctggaggaagtttgaggttgagctgtgccgccagcggatacagttttacaggatacacaatgaactgggtgaggcaggcacctggcaagggactggagtgggtggctctgattaaccccacaaagggcgtgagcacatacaaccagaagttcaaggacaggttcaccatttccgtggacaaaagcaagaacacagcctacctgcagatgaacagcctgagggctgaagatactgctgtgtactactgcgccaggtccggatactacggcgattctgactggtacttcgacgtgtggggccagggaacactggttacagtgagctcctgattctaga

SEQ ID NO: 1080 - DNA, 1019 bp, synthetic construct
  source 1..1019: mol_type = other DNA
gcggccgcaaactacaagacagacttgcaaaagaaggcatgcacagctcagcactgctctgttgcctggtcctcctgactggggtgagggccgagttctgtttgtcctccgagtttcagtgtcagtcctccggtcggtgcattcctttggcttgggtgtgtgatggtgataacgactgtagggatgactccgacgagaagagctgtaaaccaaggaccggtggtggcggatcaggtgggggaggctctggtggaggcggatccgacatccagatgacccagtccccatcctccctgtctgcttctgtgggagacagggtgaccatcacctgcagagcttcccaggacatcagaaactacctgaactggtaccagcagaagcccggcaaagcccctaaactgctcatctactacacctctcggctggaatccggcgtgccttccaggttctctggatctggaagcggcacagactacaccctgaccatctcctccctgcagcctgaagattttgctacctactactgccagcagggcaataccctgccctggacctttggtcagggcaccaaagttgaaatcaagggaggcggtggaagtggcggaggagggtcagggggaggtggatctgaggttcagttggtggagtccggaggaggattggtgcagcctggaggaagtttgaggttgagctgtgccgccagcggatacagttttacaggatacacaatgaactgggtgaggcaggcacctggcaagggactggagtgggtggctctgattaaccccacaaagggcgtgagcacatacaaccagaagttcaaggacaggttcaccatttccgtggacaaaagcaagaacacagcctacctgcagatgaacagcctgagggctgaagatactgctgtgtactactgcgccaggtccggatactacggcgattctgactggtacttcgacgtgtggggccagggaacactggttacagtgagctccggaggacaccatcaccatcatcac

SEQ ID NO: 1081 - DNA, 1439 bp, synthetic construct
  source 1..1439: mol_type = other DNA
gcggccgcaaactacaagacagacttgcaaaagaaggcatgcacagctcagcactgctctgttgcctggtcctcctgactggggtgagggccgctcctcctaaggctgttttgaagctggagcccccctggattaacgttctgcaggaagattccgttaccctgacctgtcagggcgctagatcccctgaatccgactctatccagtggttccacaacggaaatttgatccccacccacacccagccctcctatcatttcaaagccaacaacaatgactccggcgagtacacatgccagaccggacagacttccctctccgatcctgtgcacctgacagtgctctccgaatggctcgtgctccagacacctcacctggaatttcaggaaggagagacaatcatgctccgctgtcactcctggaaagacaagcccctggtgaacgtggtctttttccagaacggcaagtctcagaagttctcccacctcgaccccaccttctccatccctcaggctaaccactcccattccggcgattaccactgcaccggaaacatcggctacacccagttctcctccaaacccgtcaccatcaccgtccaggaacccagcatgggttcctcatccccaatgggaatcggtggtggcggatcaggtgggggaggctctggtggaggcggatccgacatccagatgacccagtccccatcctccctgtctgcttctgtgggagacagggtgaccatcacctgcagagcttcccaggacatcagaaactacctgaactggtaccagcagaagcccggcaaagcccctaaactgctcatctactacacctctcggctggaatccggcgtgccttccaggttctctggatctggaagcggcacagactacaccctgaccatctcctccctgcagcctgaagattttgctacctactactgccagcagggcaataccctgccctggacctttggtcagggcaccaaagttgaaatcaagggaggcggtggaagtggcggaggagggtcagggggaggtggatctgaggttcagttggtggagtccggaggaggattggtgcagcctggaggaagtttgaggttgagctgtgccgccagcggatacagttttacaggatacacaatgaactgggtgaggcaggcacctggcaagggactggagtgggtggctctgattaaccccacaaagggcgtgagcacatacaaccagaagttcaaggacaggttcaccatttccgtggacaaaagcaagaacacagcctacctgcagatgaacagcctgagggctgaagatactgctgtgtactactgcgccaggtccggatactacggcgattctgactggtacttcgacgtgtggggccagggaacactggttacagtgagctccggaggacaccatcaccatcatcac

SEQ ID NO: 1082 - DNA, 1482 bp, synthetic construct
  source 1..1482: mol_type = other DNA
gcggccgcaaactacaagacagacttgcaaaagaaggcatgcacagctcagcactgctctgttgcctggtcctcctgactggggtgagggccggaatgaggacagaggacctgcctaaggctgtggtgtttttggagccccagtggtacagggtgctggaaaaggacagtgtgacactgaagtgccagggagcatacagccctgaggataactccacccagtggtttcataatgagtctctgattagcagccaggcctcctcttacttcattgacgccgcaacagtggatgactccggcgagtataggtgtcagaccaacctgtccaccctgtccgaccctgttcagttggaggtgcacatcggctggctcttgctccaggctcctagatgggtgtttaaggaggaggaccccatccacctgaggtgtcattcctggaaaaacaccgccctgcacaacgtggtgtacctgcagaacggcaagggcaggaagtacttccaccacaactccgacttctacatccccaaggccaccctgaaggactccggctcctacttctgcaggggcctggtgggctccaagaacgtgtcctccgagacagtgaacatcaccatcaccgagggcctggccgtgcccaccatctcctccttcttcccccccggctaccagggcggtggtggcggatcaggtgggggaggctctggtggaggcggatccgacatccagatgacccagtccccatcctccctgtctgcttctgtgggagacagggtgaccatcacctgcagagcttcccaggacatcagaaactacctgaactggtaccagcagaagcccggcaaagcccctaaactgctcatctactacacctctcggctggaatccggcgtgccttccaggttctctggatctggaagcggcacagactacaccctgaccatctcctccctgcagcctgaagattttgctacctactactgccagcagggcaataccctgccctggacctttggtcagggcaccaaagttgaaatcaagggaggcggtggaagtggcggaggagggtcagggggaggtggatctgaggttcagttggtggagtccggaggaggattggtgcagcctggaggaagtttgaggttgagctgtgccgccagcggatacagttttacaggatacacaatgaactgggtgaggcaggcacctggcaagggactggagtgggtggctctgattaaccccacaaagggcgtgagcacatacaaccagaagttcaaggacaggttcaccatttccgtggacaaaagcaagaacacagcctacctgcagatgaacagcctgagggctgaagatactgctgtgtactactgcgccaggtccggatactacggcgattctgactggtacttcgacgtgtggggccagggaacactggttacagtgagctccggaggacaccatcaccatcatcactgattctaga

SEQ ID NO: 1083 - DNA, 1482 bp, synthetic construct
  source 1..1482: mol_type = other DNA
gcggccgcaaactacaagacagacttgcaaaagaaggcatgcacagctcagcactgctctgttgcctggtcctcctgactggggtgagggccggaatgaggacagaggacctgcctaaggctgtggtgtttttggagccccagtggtacagggtgctggaaaaggacagtgtgacactgaagtgccagggagcatacagccctgaggataactccacccagtggtttcataatgagtctctgattagcagccaggcctcctcttacttcattgacgccgcaacagtggatgactccggcgagtataggtgtcagaccaacctgtccaccctgtccgaccctgttcagttggaggtgcacagaggctggctcttgctccaggctcctagatgggtttttaaggaggaggaccctatccacctgaggtgccattcatggaaaaacaagctgctgcacaaggtgacctacctgcagaacggcaagggcaggaagttcttccaccacaactccgacttctacatccccaaggccaccctgaaggactccggctcctacttctgcaggggcctggtgggctccaagaacgtgtcctccgagacagtgaacatcaccatcacccagggcctggccgtgcccaccatctcctccttcttcccccccggctaccagggcggtggtggcggatcaggtgggggaggctctggtggaggcggatccgacatccagatgacccagtccccatcctccctgtctgcttctgtgggagacagggtgaccatcacctgcagagcttcccaggacatcagaaactacctgaactggtaccagcagaagcccggcaaagcccctaaactgctcatctactacacctctcggctggaatccggcgtgccttccaggttctctggatctggaagcggcacagactacaccctgaccatctcctccctgcagcctgaagattttgctacctactactgccagcagggcaataccctgccctggacctttggtcagggcaccaaagttgaaatcaagggaggcggtggaagtggcggaggagggtcagggggaggtggatctgaggttcagttggtggagtccggaggaggattggtgcagcctggaggaagtttgaggttgagctgtgccgccagcggatacagttttacaggatacacaatgaactgggtgaggcaggcacctggcaagggactggagtgggtggctctgattaaccccacaaagggcgtgagcacatacaaccagaagttcaaggacaggttcaccatttccgtggacaaaagcaagaacacagcctacctgcagatgaacagcctgagggctgaagatactgctgtgtactactgcgccaggtccggatactacggcgattctgactggtacttcgacgtgtggggccagggaacactggttacagtgagctccggaggacaccatcaccatcatcactgattctaga

SEQ ID NO: 1084 - DNA, 1455 bp, synthetic construct
  source 1..1455: mol_type = other DNA
gcggccgcaaactacaagacagacttgcaaaagaaggcatgcacagctcagcactgctctgttgcctggtcctcctgactggggtgagggccaaggcagtgatcaccctgcagccaccctgggtgtccgtgttccaggaggagacagtgacactgcactgcgaggtgctgcacttgccaggaagttcctccacacagtggttcctgaacggcaccgctacccagacaagcacaccttcttaccgcattaccagcgcatccgtgaatgactccggcgaatatcgttgccagaggggactgtccggcagatccgaccctattcagctggaaatccacagaggctggttgctgctccaggctcctagatgggtgtttaaggaggaggaccccatccacctgaggtgtcattcctggaaaaacaccgccctgcacaaggtgacctacctgcagaacggcaagggcaggaagtacttccaccacaactccgacttctacatccccaaggccaccctgaaggactccggctcctacttctgcaggggcctggtgggctccaagaacgtgtcctccgagacagtgaacatcaccatcacccagggcctggccgtgcccaccatctcctccttcttcccccccggctaccagggtggtggcggatcaggtgggggaggctctggtggaggcggatccgacatccagatgacccagtccccatcctccctgtctgcttctgtgggagacagggtgaccatcacctgcagagcttcccaggacatcagaaactacctgaactggtaccagcagaagcccggcaaagcccctaaactgctcatctactacacctctcggctggaatccggcgtgccttccaggttctctggatctggaagcggcacagactacaccctgaccatctcctccctgcagcctgaagattttgctacctactactgccagcagggcaataccctgccctggacctttggtcagggcaccaaagttgaaatcaagggaggcggtggaagtggcggaggagggtcagggggaggtggatctgaggttcagttggtggagtccggaggaggattggtgcagcctggaggaagtttgaggttgagctgtgccgccagcggatacagttttacaggatacacaatgaactgggtgaggcaggcacctggcaagggactggagtgggtggctctgattaaccccacaaagggcgtgagcacatacaaccagaagttcaaggacaggttcaccatttccgtggacaaaagcaagaacacagcctacctgcagatgaacagcctgagggctgaagatactgctgtgtactactgcgccaggtccggatactacggcgattctgactggtacttcgacgtgtggggccagggaacactggttacagtgagctccggaggacaccatcaccatcatcactgattctaga

SEQ ID NO: 1085 - DNA, 1437 bp, synthetic construct
  source 1..1437: mol_type = other DNA
gcggccgcaaactacaagacagacttgcaaaagaaggcatgcacagctcagcactgctctgttgcctggtcctcctgactggggtgagggccggaatgaggacagaggacctgcctaaggctgtggtgtttttggagccccagtggtacagggtgctggaaaaggacagtgtgacactgaagtgccagggagcatacagccctgaggataactccacccagtggtttcataatgagtctctgattagcagccaggcctcctcttacttcattgacgccgcaacagtggatgactccggcgagtataggtgtcagaccaacctgtccaccctgtccgaccctgttcagttggaggtgcacatcggctggctcttgctccaggctcctagatgggtgtttaaggaggaggaccccatccacctgaggtgtcattcctggaaaaacaccgccctgcacaaggtgacctacctgcagaacggcaagggcaggaagtacttccaccacaactccgacttctacatccccaaggccaccctgaaggactccggctcctacttctgcaggggcctggtgggctccaagaacgtgtcctccgagacagtgaacatcaccatcacccagggcctggccgtgcccaccatctcctccttcttcccccccggctaccagggtggtggcggatcaggtgggggaggctctggtggaggcggatccgaggttcagttggtggagtccggaggaggattggtgcagcctggaggaagtttgaggttgagctgtgccgccagcggatacagttttacaggatacacaatgaactgggtgaggcaggcacctggcaagggactggagtgggtggctctgattaaccccacaaagggcgtgagcacatacaaccagaagttcaaggacaggttcaccatttccgtggacaaaagcaagaacacagcctacctgcagatgaacagcctgagggctgaagatactgctgtgtactactgcgccaggtccggatactacggcgattctgactggtacttcgacgtgtggggccagggaacactggttacagtgagctccgcttctaccaaaggaccctccgtttttcccctggccccttcctccaagtccacatccggaggaaccgctgctctgggatgtttggtgaaagattatttccccgagcccgtgaccgtttcctggaatagtggcgctctgacctccggagtccacacctgccctgctgtgctgcagtcctccggactgtattctttgtcctccgttgtgaccgtgccctcctcttctttgggcacacagacttacatctgtaacgtcaaccacaaaccctccaacaccaaagtggacaaaaaggtggagcccaagtcctccgacaagacccacaccggaggacaccatcaccatcatcactgattctaga

SEQ ID NO: 1086 - DNA, 1363 bp, synthetic construct
  source 1..1363: mol_type = other DNA
gcggccgcaaactacaagacagacttgcaaaagaaggcatgcacagctcagcactgctctgttgcctggtcctcctgactggggtgagggccggaatgaggacagaggacctgcctaaggctgtggtgtttttggagccccagtggtacagggtgctggaaaaggacagtgtgacactgaagtgccagggagcatacagccctgaggataactccacccagtggtttcataatgagtctctgattagcagccaggcctcctcttacttcattgacgccgcaacagtggatgactccggcgagtataggtgtcagaccaacctgtccaccctgtccgaccctgttcagttggaggtgcacatcggctggctcttgctccaggctcctagatgggtgtttaaggaggaggaccccatccacctgaggtgtcattcctggaaaaacaccgccctgcacaaggtgacctacctgcagaacggcaagggcaggaagtacttccaccacaactccgacttctacatccccaaggccaccctgaaggactccggctcctacttctgcaggggcctggtgggctccaagaacgtgtcctccgagacagtgaacatcaccatcacccagggcctggccgtgcccaccatctcctccttcttcccccccggctaccagggtggaggaggttctggaggtggtggatcaggtggaggtggagacatccagatgacccagtccccatcctccctgtctgcttctgtgggagacagggtgaccatcacctgcagagcttcccaggacatcagaaactacctgaactggtaccagcagaagcccggcaaagcccctaaactgctcatctactacacctctcggctggaatccggcgtgccttccaggttctctggatctggaagcggcacagactacaccctgaccatctcctccctgcagcctgaagattttgctacctactactgccagcagggcaataccctgccctggacctttggtcagggcaccaaagttgaaatcaagaggacagtggcagcacctagtgtgttcatcttccccccctccgacgaacagctgaagtcaggaaccgcaagcgtggtgtgcttgctgaacaacttctaccccagggaagccaaagtgcagtggaaagtggataacgccctgcagagcggcaactctcaggaatctgtgaccgagcaggactccaaggactctacctattccctctgctccaccctgaccctgtccaaagcagattacgagaaacacaaagtctacgcctgcgaagtgacccaccagggattgtctagccccgttaccaaatcattcaaccgcggagagtcctgattctagaa

SEQ ID NO: 1087 - DNA, 1428 bp, synthetic construct
  source 1..1428: mol_type = other DNA
gcggccgcaaactacaagacagacttgcaaaagaaggcatgcacagctcagcactgctctgttgcctggtcctcctgactggggtgagggcccaggttcagctccagcagtcaggcgcagagctcgctagaccaggagcttcagtcaaaatgtcctgcaagacaagcggctacacattcaccaggtacacaatgcactgggtcaaacagaggcccggccagggattggagtggattggatatatcaaccccagcaggggctacaccaactacaaccagaaattcaaggacaaagccaccctgaccaccgacaaatccagctccacagcatacatgcagttgagctccctgaccagcgaggactccgcagtttactactgcgccaggtactacgacgaccactactccctggattactggggccagggcacaaccctgaccgtttcttccgctagcaccaaaggaccctccgtgtttcccctggccccctcttccaagtccacctccggcggaaccgccgctctgggatgtctggtgaaagattattttcccgagcccgtgaccgtgtcttggaacagcggagccctgacctccggcgtgcacacatgtcccgccgtgctgcagtctagtggcctgtattctctgtcctccgtggtgaccgtgccttcctcttccctgggcacccagacctacatctgtaacgtgaaccacaagccttccaacaccaaagtggataaaaaggtggagcccaagagctctgacaagacccacaccggtggtggcggatcaggtgggggaggctctggtggaggcggtagtggaatgaggacagaggacctgcctaaggctgtggtgtttttggagccccagtggtacagggtgctggaaaaggacagtgtgacactgaagtgccagggagcatacagccctgaggataactccacccagtggtttcataatgagtctctgattagcagccaggcctcctcttacttcattgacgccgcaacagtggatgactccggcgagtataggtgtcagaccaacctgtccaccctgtccgaccctgttcagttggaggtgcacatcggctggctcttgctccaggctcctagatgggtgtttaaggaggaggaccccatccacctgaggtgtcattcctggaaaaacaccgccctgcacaaggtgacctacctgcagaacggcaagggcaggaagtacttccaccacaactccgacttctacatccccaaggccaccctgaaggactccggctcctacttctgcaggggcctggtgggctccaagaacgtgtcctccgagacagtgaacatcaccatcacccagggcctggccgtgcccaccatctcctccttcttcccccccggctaccagggaggacatcatcatcatcaccattgattctaga

SEQ ID NO: 1088 - DNA, 1362 bp, synthetic construct
  source 1..1362: mol_type = other DNA
gcggccgcaaactacaagacagacttgcaaaagaaggcatgcacagctcagcactgctctgttgcctggtcctcctgactggggtgagggcccagatcgtcctcacccagtccccatcctccctctctgcttccctcggagaaaaggtcaccatgacctgccgcgcctcctcttctgtctcctacatgaactggtaccagcagaaacccggcacctcccctaagcgatggatctacgacacctccaaggtcgccagtggcgtgcctgataggttcagcggatctggctccggcacctcttactccctcactatctcctccatggaagctgaagatgctgctacctactactgccagcagtggtcctccaaccccctgacatttggtgcaggcacaaaactcgaactcaaacgtacggtggctgcaccatctgtcttcatcttcccgccatctgatgagcagttgaaatctggaactgcctctgttgtgtgcctgctgaataacttctatcccagagaggccaaagtacagtggaaggtggataacgccctccaatcgggtaactcccaggagagtgtcacagagcaggacagcaaggacagcacctacagcctctgtagcaccctgacgctgagcaaagcagactacgagaaacacaaagtctacgcctgcgaagtcacccatcagggcctgagttcgcccgtcacaaagagcttcaacaggggagagtctggtggtggcggatcaggtgggggaggctctggtggaggcggtagtggaatgaggacagaggacctgcctaaggctgtggtgtttttggagccccagtggtacagggtgctggaaaaggacagtgtgacactgaagtgccagggagcatacagccctgaggataactccacccagtggtttcataatgagtctctgattagcagccaggcctcctcttacttcattgacgccgcaacagtggatgactccggcgagtataggtgtcagaccaacctgtccaccctgtccgaccctgttcagttggaggtgcacatcggctggctcttgctccaggctcctagatgggtgtttaaggaggaggaccccatccacctgaggtgtcattcctggaaaaacaccgccctgcacaaggtgacctacctgcagaacggcaagggcaggaagtacttccaccacaactccgacttctacatccccaaggccaccctgaaggactccggctcctacttctgcaggggcctggtgggctccaagaacgtgtcctccgagacagtgaacatcaccatcacccagggcctggccgtgcccaccatctcctccttcttcccccccggctaccagtgattctaga

SEQ ID NO: 1089 - DNA, 2049 bp, synthetic construct
  source 1..2049: mol_type = other DNA
gcggccgcaaactacaagacagacttgcaaaagaaggcatgcacagctcagcactgctctgttgcctggtcctcctgactggggtgagggccggaatgaggacagaggatctccccaaggctgtcgtctttctcgaaccccagtggtatcgggtcctggaaaaggattccgtgaccctgaagtgccagggcgcctattcccccgaggataactcaacccagtggttccataacgaatcattgatctcatcccaggcttcttcatatttcattgatgctgctaccgtggacgatagcggtgaatacagatgccagactaacctgtctaccctgtccgaccccgtgcagctggaggtccatatcggatggctcctcttgcaggctccccggtgggtgttcaaagaggaagatccaatccatctgcggtgccattcctggaagaacacagctctgcacaaggtcacttatctgcagaatggcaaggggcggaagtacttccaccacaactctgacttctacattcccaaagcaacactgaaagactctggcagctacttttgtagaggcctcgtcggcagcaagaatgtttccagcgaaaccgtcaatatcaccatcactcaggggctggcagtccctactattagtagtttctttccacccggatatcaggggggtggaggatctggtggaggaggttctggaggtggtggatcacaggttcagctccagcagtcaggcgcagagctcgctagaccaggagcttcagtcaaaatgtcctgcaagacaagcggctacacattcaccaggtacacaatgcactgggtcaaacagaggcccggccagggattggagtggattggatatatcaaccccagcaggggctacaccaactacaaccagaaattcaaggacaaagccaccctgaccaccgacaaatccagctccacagcatacatgcagttgagctccctgaccagcgaggactccgcagtttactactgcgccaggtactacgacgaccactactccctggattactggggccagggcacaaccctgaccgtttcttccgctagcaccaaaggaccctccgtgtttcccctggccccctcttccaagtccacctccggcggaaccgccgctctgggatgtctggtgaaagattattttcccgagcccgtgaccgtgtcttggaacagcggagccctgacctccggcgtgcacacatgtcccgccgtgctgcagtctagtggcctgtattctctgtcctccgtggtgaccgtgccttcctcttccctgggcacccagacctacatctgtaacgtgaaccacaagccttccaacaccaaagtggataaaaaggtggagcccaagagctctgacaagacccacaccggtggtggcggatcaggtgggggaggctctggtggaggcggtagtggaatgaggacagaggacctgcctaaggctgtggtgtttttggagccccagtggtacagggtgctggaaaaggacagtgtgacactgaagtgccagggagcatacagccctgaggataactccacccagtggtttcataatgagtctctgattagcagccaggcctcctcttacttcattgacgccgcaacagtggatgactccggcgagtataggtgtcagaccaacctgtccaccctgtccgaccctgttcagttggaggtgcacatcggctggctcttgctccaggctcctagatgggtgtttaaggaggaggaccccatccacctgaggtgtcattcctggaaaaacaccgccctgcacaaggtgacctacctgcagaacggcaagggcaggaagtacttccaccacaactccgacttctacatccccaaggccaccctgaaggactccggctcctacttctgcaggggcctggtgggctccaagaacgtgtcctccgagacagtgaacatcaccatcacccagggcctggccgtgcccaccatctcctccttcttcccccccggctaccagggaggacatcatcatcatcaccattgattctaga

SEQ ID NO: 1090 - DNA, 1362 bp, synthetic construct
  source 1..1362: mol_type = other DNA
gcggccgcaaactacaagacagacttgcaaaagaaggcatgcacagctcagcactgctctgttgcctggtcctcctgactggggtgagggccggaatgaggacagaggacctgcctaaggctgtggtgtttttggagccccagtggtacagggtgctggaaaaggacagtgtgacactgaagtgccagggagcatacagccctgaggataactccacccagtggtttcataatgagtctctgattagcagccaggcctcctcttacttcattgacgccgcaacagtggatgactccggcgagtataggtgtcagaccaacctgtccaccctgtccgaccctgttcagttggaggtgcacatcggctggctcttgctccaggctcctagatgggtgtttaaggaggaggaccccatccacctgaggtgtcattcctggaaaaacaccgccctgcacaaggtgacctacctgcagaacggcaagggcaggaagtacttccaccacaactccgacttctacatccccaaggccaccctgaaggactccggctcctacttctgcaggggcctggtgggctccaagaacgtgtcctccgagacagtgaacatcaccatcacccagggcctggccgtgcccaccatctcctccttcttcccccccggctaccagggaggaggaggatctggtggaggaggttctggaggtggtggatcacagatcgtcctcacccagtccccatcctccctctctgcttccctcggagaaaaggtcaccatgacctgccgcgcctcctcttctgtctcctacatgaactggtaccagcagaaacccggcacctcccctaagcgatggatctacgacacctccaaggtcgccagtggcgtgcctgataggttcagcggatctggctccggcacctcttactccctcactatctcctccatggaagctgaagatgctgctacctactactgccagcagtggtcctccaaccccctgacatttggtgcaggcacaaaactcgaactcaaacgtacggtggctgcaccatctgtcttcatcttcccgccatctgatgagcagttgaaatctggaactgcctctgttgtgtgcctgctgaataacttctatcccagagaggccaaagtacagtggaaggtggataacgccctccaatcgggtaactcccaggagagtgtcacagagcaggacagcaaggacagcacctacagcctctgtagcaccctgacgctgagcaaagcagactacgagaaacacaaagtctacgcctgcgaagtcacccatcagggcctgagttcgcccgtcacaaagagcttcaacaggggagagtcttgattctaga

SEQ ID NO: 1091 - DNA, 1428 bp, synthetic construct
  source 1..1428: mol_type = other DNA
gcggccgcaaactacaagacagacttgcaaaagaaggcatgcacagctcagcactgctctgttgcctggtcctcctgactggggtgagggccggaatgaggacagaggacctgcctaaggctgtggtgtttttggagccccagtggtacagggtgctggaaaaggacagtgtgacactgaagtgccagggagcatacagccctgaggataactccacccagtggtttcataatgagtctctgattagcagccaggcctcctcttacttcattgacgccgcaacagtggatgactccggcgagtataggtgtcagaccaacctgtccaccctgtccgaccctgttcagttggaggtgcacatcggctggctcttgctccaggctcctagatgggtgtttaaggaggaggaccccatccacctgaggtgtcattcctggaaaaacaccgccctgcacaaggtgacctacctgcagaacggcaagggcaggaagtacttccaccacaactccgacttctacatccccaaggccaccctgaaggactccggctcctacttctgcaggggcctggtgggctccaagaacgtgtcctccgagacagtgaacatcaccatcacccagggcctggccgtgcccaccatctcctccttcttcccccccggctaccagggaggaggaggatctggtggaggaggttctggaggtggtggatcacaggttcagctccagcagtcaggcgcagagctcgctagaccaggagcttcagtcaaaatgtcctgcaagacaagcggctacacattcaccaggtacacaatgcactgggtcaaacagaggcccggccagggattggagtggattggatatatcaaccccagcaggggctacaccaactacaaccagaaattcaaggacaaagccaccctgaccaccgacaaatccagctccacagcatacatgcagttgagctccctgaccagcgaggactccgcagtttactactgcgccaggtactacgacgaccactactccctggattactggggccagggcacaaccctgaccgtttcttccgctagcaccaagggcccatcggtcttccccctggcaccctcctccaagagcacctctgggggcacagcggccctgggctgcctggtcaaggactacttccccgaaccggtgacggtgtcgtggaactcaggcgccctgaccagcggcgtgcacacctgtccggctgtcctacagtcctcaggactctactccctcagcagcgtggtgaccgtgccctccagcagcttgggcacccagacctacatctgcaacgtgaatcacaagcccagcaacaccaaggtggacaagaaagttgagcccaaatcttctgacaagacccacaccggaggacatcatcatcatcaccattgattctaga

SEQ ID NO: 1092 - DNA, 1713 bp, synthetic construct
  source 1..1713: mol_type = other DNA
gcggccgcaaactacaagacagacttgcaaaagaaggcatgcacagctcagcactgctctgttgcctggtcctcctgactggggtgagggccggaatgaggacagaggacctgcctaaggctgtggtgtttttggagccccagtggtacagggtgctggaaaaggacagtgtgacactgaagtgccagggagcatacagccctgaggataactccacccagtggtttcataatgagtctctgattagcagccaggcctcctcttacttcattgacgccgcaacagtggatgactccggcgagtataggtgtcagaccaacctgtccaccctgtccgaccctgttcagttggaggtgcacatcggctggctcttgctccaggctcctagatgggtgtttaaggaggaggaccccatccacctgaggtgtcattcctggaaaaacaccgccctgcacaaggtgacctacctgcagaacggcaagggcaggaagtacttccaccacaactccgacttctacatccccaaggccaccctgaaggactccggctcctacttctgcaggggcctggtgggctccaagaacgtgtcctccgagacagtgaacatcaccatcacccagggcctggccgtgcccaccatctcctccttcttcccccccggctaccagggaggaggaggatctggtggaggaggttctggaggtggtggatcagctagcacaaagggacctagcgtgtttcctctggctccatcatccaagagcacctctggaggaactgccgctctgggatgtctggtgaaagattatttccctgaacccgtgaccgtgagttggaactcaggcgctctgacctccggagtgcatacatgtcctgccgtgctgcagagtagtggcctgtattccctgtcctccgtcgtcacagtgccctcttcttccctgggaacccagacatacatctgtaacgtgaaccacaaaccctccaacaccaaagtggataagaaggtggagcccaagagctctgataagacccatacctgccctccttgcccagctcctgaagctgctgggggaccgtcagtcttcctcttccccccaaaacccaaggacaccctcatgatctcccggacccccgaggtcacatgcgtggtggtggacgtgagccacgaagaccctgaggtcaagttcaactggtacgtggacggcgtggaggtgcataatgccaagacaaagccgcgggaggagcagtacaacagcacgtaccgtgtggtcagcgtcctcaccgtcctgcaccaggactggctgaatggcaaggagtacaagtgcaaggtctccaacaaagccctcgctgcccccatcgagaaaaccatctccaaagccaaagggcagccccgagaaccacaggtgtacaccctgcccccatcccgggacgagctgaccaagaaccaggtcagcctgagctgcgccgtcaaaggcttctatcccagcgacatcgccgtggagtgggagagcaatgggcagccggagaacaactacaagaccacgcctcccgtgctggactccgacggctccttcttcctcgtgagcaagctcaccgtggacaagagcaggtggcagcaggggaacgtcttctcatgctccgtgatgcatgaggctctgcacaaccactacacgcagaagagcctctccctgtctccgggtaaatgattctaga

SEQ ID NO: 1093 - DNA, 1044 bp, synthetic construct
  source 1..1044: mol_type = other DNA
gcggccgcaaactacaagacagacttgcaaaagaaggcatgcacagctcagcactgctctgttgcctggtcctcctgactggggtgagggccggaatgaggacagaggacctgcctaaggctgtggtgtttttggagccccagtggtacagggtgctggaaaaggacagtgtgacactgaagtgccagggagcatacagccctgaggataactccacccagtggtttcataatgagtctctgattagcagccaggcctcctcttacttcattgacgccgcaacagtggatgactccggcgagtataggtgtcagaccaacctgtccaccctgtccgaccctgttcagttggaggtgcacatcggctggctcttgctccaggctcctagatgggtgtttaaggaggaggaccccatccacctgaggtgtcattcctggaaaaacaccgccctgcacaaggtgacctacctgcagaacggcaagggcaggaagtacttccaccacaactccgacttctacatccccaaggccaccctgaaggactccggctcctacttctgcaggggcctggtgggctccaagaacgtgtcctccgagacagtgaacatcaccatcacccagggcctggccgtgcccaccatctcctccttcttcccccccggctaccagggaggaggaggatctggtggaggaggttctggaggtggtggatcacgtacggtggctgcaccatctgtcttcatcttcccgccatctgatgagcagttgaaatctggaactgcctctgttgtgtgcctgctgaataacttctatcccagagaggccaaagtacagtggaaggtggataacgccctccaatcgggtaactcccaggagagtgtcacagagcaggacagcaaggacagcacctacagcctctgtagcaccctgacgctgagcaaagcagactacgagaaacacaaagtctacgcctgcgaagtcacccatcagggcctgagttcgcccgtcacaaagagcttcaacaggggagagtcttgattctaga

SEQ ID NO: 1094 - DNA, 1467 bp, synthetic construct
  source 1..1467: mol_type = other DNA
gcggccgcaaactacaagacagacttgcaaaagaaggcatgcacagctcagcactgctctgttgcctggtcctcctgactggggtgagggccgaagtgcagctggtggagagcggaggaggattggtgcagcctggaggaagcctgaagctgagctgcgctgctagcggatttacctttaacaaatatgccatgaactgggtgaggcaggcccccggaaaaggattggagtgggtggctaggattaggagcaagtacaacaactacgccacctactatgccgacagcgtgaaggaccgattcaccatctccagggacgacagcaaaaacaccgcctacctgcagatgaacaacctgaaaactgaagataccgccgtgtactactgcgtgaggcacggcaacttcggcaactcctacatctcctactgggcctactggggccagggcaccctggtgaccgtgtcctccgctagcaccaagggcccatcggtcttccccctggcaccctcctccaagagcacctctgggggcacagcggccctgggctgcctggtcaaggactacttccccgaaccggtgacggtgtcgtggaactcaggcgccctgaccagcggcgtgcacaccttcccggctgtcctacagtcctcaggactctactccctcagcagcgtggtgaccgtgccctccagcagcttgggcacccagacctacatctgcaacgtgaatcacaagcccagcaacaccaaggtggacaagaaagttgagcccaaatcttgtgacaaaactcacacatgcccaccgtgcccagcacctgaagccgcagggggaccgtcagtcttcctcttccccccaaaacccaaggacaccctcatgatctcccggacccccgaggtcacatgcgtggtggtggacgtgagccacgaagaccctgaggtcaagttcaactggtacgtggacggcgtggaggtgcataatgccaagacaaagccgcgggaggagcagtacaacagcacgtaccgtgtggtcagcgtcctcaccgtcctgcaccaggactggctgaatggcaaggagtacaagtgcaaggtctccaacaaagccctcgctgcccccatcgagaaaaccatctccaaagccaaagggcagccccgagaaccacaggtgtacaccctgcccccatcccgggacgagctgaccaagaaccaggtcagcctgtggtgcctggtcaaaggcttctatcccagcgacatcgccgtggagtgggagagcaatgggcagccggagaacaactacaagaccacgcctcccgtgctggactccgacggctccttcttcctctacagcaagctcaccgtggacaagagcaggtggcagcaggggaacgtcttctcatgctccgtgatgcatgaggctctgcacaaccactacacgcagaagagcctctccctgtctccgggtaaatgattctaga

SEQ ID NO: 1095 - DNA, 747 bp, synthetic construct
  source 1..747: mol_type = other DNA
gcggccgcaaactacaagacagacttgcaaaagaaggcatgcacagctcagcactgctctgttgcctggtcctcctgactggggtgagggcccagacagtcgtgacccaggagccatccctgaccgtttcccctggaggaaccgtcaccctcacctgtggaagctccaccggagcagtgacctccggaaactaccccaactgggtccagcagaaacccggacaggcccctagaggtctgattggtggcaccaaattcctcgctcccggcacacctgccagattctcaggaagtctgctcggcggcaaagccgctttgactctgtccggagtgcagcctgaggatgaagccgagtactactgcgttctctggtactccaatagatgggtgttcggggggggcactaagttgaccgtcttgtctcagcctaaagccgcaccatccgtcactctgttcccgccctcctctgaggagctccaagccaacaaggccacactagtgtgtctggttagtgacttctacccgggagctgtgacagtggcctggaaggcagatggcagccccgtcaaggttggagtggagaccaccaaaccctccaaacagagcaacaacaagtacgcggccagcagctacctgagcctgacgcccgagcagtggaagtcccacagaagctacagctgcagagtcacgcatgaagggagcaccgtggagaagacagtggcccctgctgaatgttcttgattctaga

SEQ ID NO: 1096 - DNA, 1587 bp, synthetic construct
  source 1..1587: mol_type = other DNA
gcggccgcaaactacaagacagacttgcaaaagaaggcatgcacagctcagcactgctctgttgcctggtcctcctgactggggtgagggcccaggtccagctgcagcagcctggcgctgaactcgtgaaacccggcgccagcgtcaagatgtcctgcaaggcttctggctacacctttaccaattattggatcaactgggtgaagcagcggcctggtcaggggttggagtggattggagatatttaccctgggggtggaatcacaaattacaacgagaaatttaagacaaaagccaccctcactctcgacacaagctcaagcacagtttacatgcagttgtccagtctcactagtgaagattctgctgtgtactactgtagccggtcttatggaaagtactttgattactgggggcagggtaccacattgatcgtgtccagcgcttcaactaaaggaccttctgttttccccttggctccacaggtgcagctgcagcagccaggcgccgagctggttaagccaggggccagtgttaagatgagctgtaaggcaagtggctatacttttactaattactggattaactgggtcaaacagcgacccggccaggggctcgaatggattggggatatctatccaggaggaggtattaccaactataatgagaagttcaagactaaagctacactcacactggacacatcatcctctactgtctacatgcagctgtcatctctcacatcagaggacagcgctgtgtattactgctccaggtcctatggcaagtacttcgactactggggacagggaacaactttgatcgtttcctcagcttcaaccaaaggtccctccgtgttcccattggcccctcaggttcagctccagcagtcaggcgcagagctcgctagaccaggagcttcagtcaaaatgtcctgcaagacaagcggctacacattcaccaggtacacaatgcactgggtcaaacagaggcccggccagggattggagtggattggatatatcaaccccagcaggggctacaccaactacaaccagaaattcaaggacaaagccaccctgaccaccgacaaatccagctccacagcatacatgcagttgagctccctgaccagcgaggactccgcagtttactactgcgccaggtactacgacgaccactactccctggattactggggccagggcacaaccctgaccgtttcttccgctagcaccaagggcccatcggtcttccccctggcaccctcctccaagagcacctctgggggcacagcggccctgggctgcctggtcaaggactacttccccgaaccggtgacggtgtcgtggaactcaggcgccctgaccagcggcgtgcacacctgtccggctgtcctacagtcctcaggactctactccctcagcagcgtggtgaccgtgccctccagcagcttgggcacccagacctacatctgcaacgtgaatcacaagcccagcaacaccaaggtggacaagaaagttgagcccaaatcttctgacaagacccacaccggaggacatcatcatcatcaccattgattctaga

SEQ ID NO: 1097 - DNA, 1461 bp, synthetic construct
  source 1..1461: mol_type = other DNA
gcggccgcaaactacaagacagacttgcaaaagaaggcatgcacagctcagcactgctctgttgcctggtcctcctgactggggtgagggccgacattaagatgacacagtccccttccagcatgtatgcctccgtgggagaacgggtcaccatcacatgcaaagccagccaggacattaaaagctacctcacctggtatcagaagaagccctggaaatcaccccgtaccttgattttctattctacacggttggcagacggcgttcctagcagattctccgggtccggcagcggtcaggatttctctctgacaattagtagtctggaatctgacgataccgccacctactactgtctccagcatgatgaatcaccctttactttcggcggtggtaccaagctcgagattaaacgaactgtggctgcaccctcagtttttatttttcctccagatatcaagatgactcagtcaccctcttcaatgtacgccagtgtcggcgagcgagttaccattacatgcaaggcctcccaggatatcaagtcctatttgacatggtaccagaagaaaccctggaagtccccacggaccttgatcttctatagtaccaggctggcagatggagttccctcacgcttttcaggatcaggctctgggcaggacttttccctgacaatcagcagcctggagtcagacgacacagccacatattattgcctccagcacgacgaaagtccttttacatttggcggagggaccaaactggaaattaaacgcaccgttgccgccccatctgttttcatctttcccccccagatcgtcctcacccagtccccatcctccctctctgcttccctcggagaaaaggtcaccatgacctgccgcgcctcctcttctgtctcctacatgaactggtaccagcagaaacccggcacctcccctaagcgatggatctacgacacctccaaggtcgccagtggcgtgcctgataggttcagcggatctggctccggcacctcttactccctcactatctcctccatggaagctgaagatgctgctacctactactgccagcagtggtcctccaaccccctgacatttggtgcaggcacaaaactcgaactcaaacgtacggtggctgcaccatctgtcttcatcttcccgccatctgatgagcagttgaaatctggaactgcctctgttgtgtgcctgctgaataacttctatcccagagaggccaaagtacagtggaaggtggataacgccctccaatcgggtaactcccaggagagtgtcacagagcaggacagcaaggacagcacctacagcctctgtagcaccctgacgctgagcaaagcagactacgagaaacacaaagtctacgcctgcgaagtcacccatcagggcctgagttcgcccgtcacaaagagcttcaacaggggagagtcttgattctaga

SEQ ID NO: 1098 - DNA, 1167 bp, synthetic construct
  source 1..1167: mol_type = other DNA
gcggccgcaaactacaagacagacttgcaaaagaaggcatgcacagctcagcactgctctgttgcctggtcctcctgactggggtgagggcccaggtccagctccagcagcccggagctgagctcgtgaagcctggcgcttccgtgaagatgagctgcaaggcttctggctatacatttacaaactactggattaattgggtcaaacagaggcctggacagggactcgaatggattggcgatatttacccaggcgggggtatcaccaattataatgaaaagttcaaaaccaaagcaactctcaccttggacacaagttcctctacagtctacatgcagctgagttcactcactagcgaggattccgctgtttattattgttctcgctcttacggcaagtactttgactactggggccagggaacaaccttgattgtgagcagtgcttctaccaagggaccttccgtctttccattggcaccccaggtgcagctgcagcagcctggggctgaattggttaaaccaggagcaagtgtcaaaatgtcatgcaaagccagcggttatactttcacaaactactggatcaattgggtgaaacagcgtccaggccaggggctggagtggatcggggatatctatcccgggggcgggatcacaaattacaatgagaagtttaaaactaaagctaccctgactttggatacttcttcatccacagtgtatatgcagctgtctagcctcacttctgaggacagcgctgtttactactgcagtaggagttacggtaaatactttgattactggggacagggcacaactctcatcgtcagctccgctagcaccaaaggaccctccgtgtttcccctggccccctcttccaagtccacctccggcggaaccgccgctctgggatgtctggtgaaagattattttcccgagcccgtgaccgtgtcttggaacagcggagccctgacctccggcgtgcacacatgtcccgccgtgctgcagtctagtggcctgtattctctgtcctccgtggtgaccgtgccttcctcttccctgggcacccagacctacatctgtaacgtgaaccacaagccttccaacaccaaagtggataaaaaggtggagcccaagagctctgacaagacccacacctgattctaga

SEQ ID NO: 1099 - DNA, 1893 bp, synthetic construct
  source 1..1893: mol_type = other DNA
gcggccgcaaactacaagacagacttgcaaaagaaggcatgcacagctcagcactgctctgttgcctggtcctcctgactggggtgagggccgacattaagatgacacagtccccttccagcatgtacgcttccgtgggagaaagggtgaccatcacatgcaaagccagccaggacattaagtcctacctcacctggtaccagaagaagccttggaagtccccacgaaccctgatcttctattctacacgtctggcagatggggtgcccagcagattctctggctccggctccggacaggatttctcactgactattagtagcttggagtccgatgatacagcaacttactattgcctgcagcatgatgaatcccctttcacttttgggggtggtacaaagctcgagattaagcggacagtggctgcaccatccgtgttcatttttcctccagacatcaagatgactcagtcccccagctctatgtacgcctctgtgggagaacgtgtcaccattacatgtaaggcatcacaggatattaaatcttacctcacttggtatcagaagaaaccctggaagtcaccccggactctcatcttttatagtactagactggcagacggagtgccctcccgtttcagcggaagcgggtcaggacaggacttttctctcaccattagttctctcgaatcagacgacaccgcaacctattattgcttgcagcacgacgagtctcctttcacctttggcgggggtactaaactcgagatcaagcgtacggtggctgcaccatctgtcttcatcttcccgccatctgatgagcagttgaaatctggaactgcctctgttgtgtgcctgctgaataacttctatcccagagaggccaaagtacagtggaaggtggataacgccctccaatcgggtaactcccaggagagtgtcacagagcaggacagcaaggacagcacctacagcctctgtagcaccctgacgctgagcaaagcagactacgagaaacacaaagtctacgcctgcgaagtcacccatcagggcctgagttcgcccgtcacaaagagcttcaacaggggagagtctggtggtggcggatcaggtgggggaggctctggtggaggcggtagtcaggttcagctccagcagtcaggcgcagagctcgctagaccaggagcttcagtcaaaatgtcctgcaagacaagcggctacacattcaccaggtacacaatgcactgggtcaaacagaggcccggccagggattggagtggattggatatatcaaccccagcaggggctacaccaactacaaccagaaattcaaggacaaagccaccctgaccaccgacaaatccagctccacagcatacatgcagttgagctccctgaccagcgaggactccgcagtttactactgcgccaggtactacgacgaccactactccctggattactggggccagggcacaaccctgaccgtttcttccggtggcggtggatctggaggcggaggtagtggtgggggaggttcacagatcgtcctcacccagtccccatcctccctctctgcttccctcggagaaaaggtcaccatgacctgccgcgcctcctcttctgtctcctacatgaactggtaccagcagaaacccggcacctcccctaagcgatggatctacgacacctccaaggtcgccagtggcgtgcctgataggttcagcggatctggctccggcacctcttactccctcactatctcctccatggaagctgaagatgctgctacctactactgccagcagtggtcctccaaccccctgacatttggtgcaggcacaaaactcgaactcaaaggaggacatcatcatcatcaccattgattctaga

SEQ ID NO: 1100 - DNA, 1569 bp, synthetic construct
  source 1..1569: mol_type = other DNA
gcggccgcaaactacaagacagacttgcaaaagaaggcatgcacagctcagcactgctctgttgcctggtcctcctgactggggtgagggcccaagtccaactccaacaaagcggcgccgaactcgccagaccaggagcttctgtcaaaatgagctgcaaaaccagcggctacaccttcaccagatacaccatgcactgggtcaaacaaagacccggccaaggcctcgagtggattggatacattaaccccagcagaggctataccaactacaaccaaaagttcaaggacaaagccacactgaccacagacaaaagcagcagcaccgcctacatgcagctgagcagcctgaccagcgaagattctgctgtctactactgcgccagatactacgacgaccactactccctcgactactggggccaagggaccacactgaccgtgtctagcgctagcaccaaaggaccctccgtgtttcccctggccccctcttccaagtccacctccggcggaaccgccgctctgggatgtctggtgaaagattattttcccgagcccgtgaccgtgtcttggaacagcggagccctgacctccggcgtgcacacatgtcccgccgtgctgcagtctagtggcctgtattctctgtcctccgtggtgaccgtgccttcctcttccctgggcacccagacctacatctgtaacgtgaaccacaagccttccaacaccaaagtggataaaaaggtggagcccaagagctctgacaagacccacaccggtggtggcggatcaggtgggggaggctctggtggaggcggtagtgatatcaagatgacccagagccccagcagcatgtacgcctctgtgggagagagagtgaccattacctgcaaggccagccaagacattaagagctacctgacctggtaccagaagaagccatggaaaagccccagaaccctgatcttctacagcacccggctggccgacggagttccttctaggttcagcggaagcggcagcggacaggatttctccctgactatcagcagcctcgagagcgacgacaccgcaacatactactgcctgcagcacgacgaatcaccctttaccttcggcgggggcaccaagctggagattaagggtggcggtggatctggaggcggaggtagtggtgggggaggttcacaagtccaactccaacaacccggcgccgagctggttaaacccggagcttcagtcaaaatgtcctgcaaagccagcggctacaccttcaccaactactggatcaactgggtcaaacaaagacccggccaaggcctcgaatggatcggagatatctacccaggaggaggcatcaccaactacaacgaaaagttcaagaccaaagccaccctcaccctggacacctctagctcaaccgtgtacatgcagctgagcagcctgaccagcgaggactctgcagtgtactactgcagcagaagctacggcaagtacttcgactactggggccaaggcaccaccctgatcgtgtctagcggaggacatcatcatcatcaccattgattctaga

SEQ ID NO: 1101 - DNA, 1503 bp, synthetic construct
  source 1..1503: mol_type = other DNA
gcggccgcaaactacaagacagacttgcaaaagaaggcatgcacagctcagcactgctctgttgcctggtcctcctgactggggtgagggcccaaatcgtcctcacccaaagcccctcctccctctcagctagcctcggagaaaaggtcaccatgacctgcagagcctcctccagcgtgtcctacatgaactggtaccaacaaaagcccggcaccagccccaaaagatggatctacgacacctccaaagtggccagcggagtgcctgaccgattctctggatctggctccggcaccagctacagcctgacaatcagcagcatggaagctgaagatgctgctacctactactgccagcagtggagctctaaccccctgaccttcggcgcaggtaccaaactggaactgaaacgtacggtggctgcaccatctgtcttcatcttcccgccatctgatgagcagttgaaatctggaactgcctctgttgtgtgcctgctgaataacttctatcccagagaggccaaagtacagtggaaggtggataacgccctccaatcgggtaactcccaggagagtgtcacagagcaggacagcaaggacagcacctacagcctctgtagcaccctgacgctgagcaaagcagactacgagaaacacaaagtctacgcctgcgaagtcacccatcagggcctgagttcgcccgtcacaaagagcttcaacaggggagagtctggtggtggcggatcaggtgggggaggctctggtggaggcggtagtgatatcaagatgacccagagccccagcagcatgtacgcctctgtgggagagagagtgaccattacctgcaaggccagccaagacattaagagctacctgacctggtaccagaagaagccatggaaaagccccagaaccctgatcttctacagcacccggctggccgacggagttccttctaggttcagcggaagcggcagcggacaggatttctccctgactatcagcagcctcgagagcgacgacaccgcaacatactactgcctgcagcacgacgaatcaccctttaccttcggcgggggcaccaagctggagattaagggtggcggtggatctggaggcggaggtagtggtgggggaggttcacaagtccaactccaacaacccggcgccgagctggttaaacccggagcttcagtcaaaatgtcctgcaaagccagcggctacaccttcaccaactactggatcaactgggtcaaacaaagacccggccaaggcctcgaatggatcggagatatctacccaggaggaggcatcaccaactacaacgaaaagttcaagaccaaagccaccctcaccctggacacctctagctcaaccgtgtacatgcagctgagcagcctgaccagcgaggactctgcagtgtactactgcagcagaagctacggcaagtacttcgactactggggccaaggcaccaccctgatcgtgtctagctgattctaga

SEQ ID NO: 1102 - DNA, 1227 bp, synthetic construct
  source 1..1227: mol_type = other DNA
gcggccgcaaactacaagacagacttgcaaaagaaggcatgcacagctcagcactgctctgttgcctggtcctcctgactggggtgagggcccaggttcagctccagcagtcaggcgcagagctcgctagaccaggagcttcagtcaaaatgtcctgcaagacaagcggctacacattcaccaggtacacaatgcactgggtcaaacagaggcccggccagggattggagtggattggatatatcaaccccagcaggggctacaccaactacaaccagaaattcaaggacaaagccaccctgaccaccgacaaatccagctccacagcatacatgcagttgagctccctgaccagcgaggactccgcagtttactactgcgccaggtactacgacgaccactactccctggattactggggccagggcacaaccctgaccgtttcttccgctagcaccaaaggaccctccgtgtttcccctggccccctcttccaagtccacctccggcggaaccgccgctctgggatgtctggtgaaagattattttcccgagcccgtgaccgtgtcttggaacagcggagccctgacctccggcgtgcacacatgtcccgccgtgctgcagtctagtggcctgtattctctgtcctccgtggtgaccgtgccttcctcttccctgggcacccagacctacatctgtaacgtgaaccacaagccttccaacaccaaagtggataaaaaggtggagcccaagagctctgacaagacccacaccggtggtggcggatcaggtgggggaggctctggtggaggcggtagtcaggttcagctccaggagtcaggcggaggactcgttcaggctggaggatcactcaggctctcctgcgctgcatcaggcagagcagtgggaaactacatcatcggctggttcaggcaggcacccggaaaagagagggagtttgtggctaccaccacaagggacggaggctctaccttctacgccgacagtgtcaagggaagattcaccatcagcagggacaatgctaagaacaccgtgaacctgcagatgaacagcctggagcccgaagatactgctgtgtactattgtgccgccaagagctggagcgtgccattgaggcctacaagcgccgacttcgactcctggggacagggaacacaggtgaccgtgtcctctggaggacatcatcatcatcaccattgattctaga

SEQ ID NO: 1103 - DNA, 1161 bp, synthetic construct
  source 1..1161: mol_type = other DNA
gcggccgcaaactacaagacagacttgcaaaagaaggcatgcacagctcagcactgctctgttgcctggtcctcctgactggggtgagggcccagatcgtcctcacccagtccccatcctccctctctgcttccctcggagaaaaggtcaccatgacctgccgcgcctcctcttctgtctcctacatgaactggtaccagcagaaacccggcacctcccctaagcgatggatctacgacacctccaaggtcgccagtggcgtgcctgataggttcagcggatctggctccggcacctcttactccctcactatctcctccatggaagctgaagatgctgctacctactactgccagcagtggtcctccaaccccctgacatttggtgcaggcacaaaactcgaactcaaacgtacggtggctgcaccatctgtcttcatcttcccgccatctgatgagcagttgaaatctggaactgcctctgttgtgtgcctgctgaataacttctatcccagagaggccaaagtacagtggaaggtggataacgccctccaatcgggtaactcccaggagagtgtcacagagcaggacagcaaggacagcacctacagcctctgtagcaccctgacgctgagcaaagcagactacgagaaacacaaagtctacgcctgcgaagtcacccatcagggcctgagttcgcccgtcacaaagagcttcaacaggggagagtctggtggtggcggatcaggtgggggaggctctggtggaggcggtagtcaggttcagctccaggagtcaggcggaggactcgttcaggctggaggatcactcaggctctcctgcgctgcatcaggcagagcagtgggaaactacatcatcggctggttcaggcaggcacccggaaaagagagggagtttgtggctaccaccacaagggacggaggctctaccttctacgccgacagtgtcaagggaagattcaccatcagcagggacaatgctaagaacaccgtgaacctgcagatgaacagcctggagcccgaagatactgctgtgtactattgtgccgccaagagctggagcgtgccattgaggcctacaagcgccgacttcgactcctggggacagggaacacaggtgaccgtgtcctcttgattctaga

SEQ ID NO: 1104 - DNA, 1197 bp, synthetic construct
  source 1..1197: mol_type = other DNA
gcggccgcaaactacaagacagacttgcaaaagaaggcatgcacagctcagcactgctctgttgcctggtcctcctgactggggtgagggcccaggttcagctccagcagtcaggcgcagagctcgctagaccaggagcttcagtcaaaatgtcctgcaagacaagcggctacacattcaccaggtacacaatgcactgggtcaaacagaggcccggccagggattggagtggattggatatatcaaccccagcaggggctacaccaactacaaccagaaattcaaggacaaagccaccctgaccaccgacaaatccagctccacagcatacatgcagttgagctccctgaccagcgaggactccgcagtttactactgcgccaggtactacgacgaccactactccctggattactggggccagggcacaaccctgaccgtttcttccgctagcaccaaaggaccctccgtgtttcccctggccccctcttccaagtccacctccggcggaaccgccgctctgggatgtctggtgaaagattattttcccgagcccgtgaccgtgtcttggaacagcggagccctgacctccggcgtgcacacatgtcccgccgtgctgcagtctagtggcctgtattctctgtcctccgtggtgaccgtgccttcctcttccctgggcacccagacctacatctgtaacgtgaaccacaagccttccaacaccaaagtggataaaaaggtggagcccaagagctctgacaagacccacaccggtggtggcggatcaggtgggggaggctctggtggaggcggtagtcaggttcagctccaggagtcaggcggaggactcgttcagccaggagaaagcctcaggctctcatgcgccgcttccggaatcgcattcgaggtctttaacatgggctggtacagacaggctcccggcaaacagagggagctggttgctacaattaccaactccggggccaccaactacgccgatagcgttaagggaaggtttactatttccagggacaacgctaaggacaccctctacctccagatgaacagcctgaaacccgaagatactgctgtgtactattgcaacgcccagaactcctggaggaacatctggggccagggcacacaggtgaccgtttcatccggaggacatcatcatcatcaccattgattctaga

SEQ ID NO: 1105 - DNA, 1131 bp, synthetic construct
  source 1..1131: mol_type = other DNA
gcggccgcaaactacaagacagacttgcaaaagaaggcatgcacagctcagcactgctctgttgcctggtcctcctgactggggtgagggcccagatcgtcctcacccagtccccatcctccctctctgcttccctcggagaaaaggtcaccatgacctgccgcgcctcctcttctgtctcctacatgaactggtaccagcagaaacccggcacctcccctaagcgatggatctacgacacctccaaggtcgccagtggcgtgcctgataggttcagcggatctggctccggcacctcttactccctcactatctcctccatggaagctgaagatgctgctacctactactgccagcagtggtcctccaaccccctgacatttggtgcaggcacaaaactcgaactcaaacgtacggtggctgcaccatctgtcttcatcttcccgccatctgatgagcagttgaaatctggaactgcctctgttgtgtgcctgctgaataacttctatcccagagaggccaaagtacagtggaaggtggataacgccctccaatcgggtaactcccaggagagtgtcacagagcaggacagcaaggacagcacctacagcctctgtagcaccctgacgctgagcaaagcagactacgagaaacacaaagtctacgcctgcgaagtcacccatcagggcctgagttcgcccgtcacaaagagcttcaacaggggagagtctggtggtggcggatcaggtgggggaggctctggtggaggcggtagtcaggttcagctccaggagtcaggcggaggactcgttcagccaggagaaagcctcaggctctcatgcgccgcttccggaatcgcattcgaggtctttaacatgggctggtacagacaggctcccggcaaacagagggagctggttgctacaattaccaactccggggccaccaactacgccgatagcgttaagggaaggtttactatttccagggacaacgctaaggacaccctctacctccagatgaacagcctgaaacccgaagatactgctgtgtactattgcaacgcccagaactcctggaggaacatctggggccagggcacacaggtgaccgtttcatcctgattctaga

SEQ ID NO: 1106 - DNA, 1407 bp, synthetic construct
  source 1..1407: mol_type = other DNA
gcggccgcaaactacaagacagacttgcaaaagaaggcatgcacagctcagcactgctctgttgcctggtcctcctgactggggtgagggcccaggttcagctccagcagtcaggcgcagagctcgctagaccaggagcttcagtcaaaatgtcctgcaagacaagcggctacacattcaccaggtacacaatgcactgggtcaaacagaggcccggccagggattggagtggattggatatatcaaccccagcaggggctacaccaactacaaccagaaattcaaggacaaagccaccctgaccaccgacaaatccagctccacagcatacatgcagttgagctccctgaccagcgaggactccgcagtttactactgcgccaggtactacgacgaccactactccctggattactggggccagggcacaaccctgaccgtttcttccgctagcaccaaaggaccctccgtgtttcccctggccccctcttccaagtccacctccggcggaaccgccgctctgggatgtctggtgaaagattattttcccgagcccgtgaccgtgtcttggaacagcggagccctgacctccggcgtgcacacatgtcccgccgtgctgcagtctagtggcctgtattctctgtcctccgtggtgaccgtgccttcctcttccctgggcacccagacctacatctgtaacgtgaaccacaagccttccaacaccaaagtggataaaaaggtggagcccaagagctctgacaagacccacaccggtggtggcggatcaggtgggggaggctctggtggaggcggtagtgctttgcctaaggccgtggttaagttggaccctccctggattcaggtgctgaaggaggatatggtgaccctcatgtgtgaaggaacccataatcccggaaattcctccacccagtggtttcacaacggcagaagtatcaggagccaggtgcaggccagctacaccttcaaggcaaccgtgaatgactccggcgagtacaggtgccagatggagcagacccgtctgtccgaccctgttgacctgggagtgatcagcgactggctcctgctgcagacccctcagagagtgtttctcgaaggagagactatcacactgcggtgccactcctggaggaacaaactcctgaaccgcatttcctttttccataacgagaagtccgtgaggtaccaccactacaaatccaacttctccatccccaaagccaaccactcccattctggcgactactactgcaagggctccctgggaagcacccagcatcagtcaaaacccgtcaccatcaccgtccaggaccccgctacaacctcctcaatctccctggtgtggtaccacaccggaggacatcatcatcatcaccattgattctaga

SEQ ID NO: 1107 - DNA, 1341 bp, synthetic construct
  source 1..1341: mol_type = other DNA
gcggccgcaaactacaagacagacttgcaaaagaaggcatgcacagctcagcactgctctgttgcctggtcctcctgactggggtgagggcccagatcgtcctcacccagtccccatcctccctctctgcttccctcggagaaaaggtcaccatgacctgccgcgcctcctcttctgtctcctacatgaactggtaccagcagaaacccggcacctcccctaagcgatggatctacgacacctccaaggtcgccagtggcgtgcctgataggttcagcggatctggctccggcacctcttactccctcactatctcctccatggaagctgaagatgctgctacctactactgccagcagtggtcctccaaccccctgacatttggtgcaggcacaaaactcgaactcaaacgtacggtggctgcaccatctgtcttcatcttcccgccatctgatgagcagttgaaatctggaactgcctctgttgtgtgcctgctgaataacttctatcccagagaggccaaagtacagtggaaggtggataacgccctccaatcgggtaactcccaggagagtgtcacagagcaggacagcaaggacagcacctacagcctctgtagcaccctgacgctgagcaaagcagactacgagaaacacaaagtctacgcctgcgaagtcacccatcagggcctgagttcgcccgtcacaaagagcttcaacaggggagagtctggtggtggcggatcaggtgggggaggctctggtggaggcggtagtgctttgcctaaggccgtggttaagttggaccctccctggattcaggtgctgaaggaggatatggtgaccctcatgtgtgaaggaacccataatcccggaaattcctccacccagtggtttcacaacggcagaagtatcaggagccaggtgcaggccagctacaccttcaaggcaaccgtgaatgactccggcgagtacaggtgccagatggagcagacccgtctgtccgaccctgttgacctgggagtgatcagcgactggctcctgctgcagacccctcagagagtgtttctcgaaggagagactatcacactgcggtgccactcctggaggaacaaactcctgaaccgcatttcctttttccataacgagaagtccgtgaggtaccaccactacaaatccaacttctccatccccaaagccaaccactcccattctggcgactactactgcaagggctccctgggaagcacccagcatcagtcaaaacccgtcaccatcaccgtccaggaccccgctacaacctcctcaatctccctggtgtggtaccacacctgattctaga

SEQ ID NO: 1108 - DNA, 1386 bp, synthetic construct
  source 1..1386: mol_type = other DNA
gcggccgcaaactacaagacagacttgcaaaagaaggcatgcacagctcagcactgctctgttgcctggtcctcctgactggggtgagggcccaggttcagctccagcagtcaggcgcagagctcgctagaccaggagcttcagtcaaaatgtcctgcaagacaagcggctacacattcaccaggtacacaatgcactgggtcaaacagaggcccggccagggattggagtggattggatatatcaaccccagcaggggctacaccaactacaaccagaaattcaaggacaaagccaccctgaccaccgacaaatccagctccacagcatacatgcagttgagctccctgaccagcgaggactccgcagtttactactgcgccaggtactacgacgaccactactccctggattactggggccagggcacaaccctgaccgtttcttccgctagcaccaaaggaccctccgtgtttcccctggccccctcttccaagtccacctccggcggaaccgccgctctgggatgtctggtgaaagattattttcccgagcccgtgaccgtgtcttggaacagcggagccctgacctccggcgtgcacacatgtcccgccgtgctgcagtctagtggcctgtattctctgtcctccgtggtgaccgtgccttcctcttccctgggcacccagacctacatctgtaacgtgaaccacaagccttccaacaccaaagtggataaaaaggtggagcccaagagctctgacaagacccacaccggtggtggcggatcaggtgggggaggctctggtggaggcggtagtacacacgacctgccaaaagccgtcgtcaaactcgagcccccctggattcaggtcctgaaagaggacaccgtcaccctgacctgcgaaggaacccacaacccaggcaactccagcacacagtggttccacaacggaagaagtatccgctcccaggtccaggcctcctacacattcaaggccaccgtgaatgactctggcgagtacaggtgccagatggagcagaccaggttgagcgaccctgtggacctcggtgtgatctccgattggttgctgctccagacaccccagctcgtgttcctggagggagagacaattacactcaggtgccactcctggaggaacaaactgttgaaccgcatctccttttttcataacgagaagtccgtccggtaccaccactactcctccaatttctccattcccaaggccaaccactcccactccggcgattactactgcaaaggctccctgggtcgcaccctgcatcagtctaaacccgtcaccatcaccgtccagggccctaaaagctccaggggaggacatcatcatcatcaccattgattctaga

SEQ ID NO: 1109 - DNA, 1320 bp, synthetic construct
  source 1..1320: mol_type = other DNA
gcggccgcaaactacaagacagacttgcaaaagaaggcatgcacagctcagcactgctctgttgcctggtcctcctgactggggtgagggcccagatcgtcctcacccagtccccatcctccctctctgcttccctcggagaaaaggtcaccatgacctgccgcgcctcctcttctgtctcctacatgaactggtaccagcagaaacccggcacctcccctaagcgatggatctacgacacctccaaggtcgccagtggcgtgcctgataggttcagcggatctggctccggcacctcttactccctcactatctcctccatggaagctgaagatgctgctacctactactgccagcagtggtcctccaaccccctgacatttggtgcaggcacaaaactcgaactcaaacgtacggtggctgcaccatctgtcttcatcttcccgccatctgatgagcagttgaaatctggaactgcctctgttgtgtgcctgctgaataacttctatcccagagaggccaaagtacagtggaaggtggataacgccctccaatcgggtaactcccaggagagtgtcacagagcaggacagcaaggacagcacctacagcctctgtagcaccctgacgctgagcaaagcagactacgagaaacacaaagtctacgcctgcgaagtcacccatcagggcctgagttcgcccgtcacaaagagcttcaacaggggagagtctggtggtggcggatcaggtgggggaggctctggtggaggcggtagtacacacgacctgccaaaagccgtcgtcaaactcgagcccccctggattcaggtcctgaaagaggacaccgtcaccctgacctgcgaaggaacccacaacccaggcaactccagcacacagtggttccacaacggaagaagtatccgctcccaggtccaggcctcctacacattcaaggccaccgtgaatgactctggcgagtacaggtgccagatggagcagaccaggttgagcgaccctgtggacctcggtgtgatctccgattggttgctgctccagacaccccagctcgtgttcctggagggagagacaattacactcaggtgccactcctggaggaacaaactgttgaaccgcatctccttttttcataacgagaagtccgtccggtaccaccactactcctccaatttctccattcccaaggccaaccactcccactccggcgattactactgcaaaggctccctgggtcgcaccctgcatcagtctaaacccgtcaccatcaccgtccagggccctaaaagctccaggtgattctaga

SEQ ID NO: 1110 - DNA, 1686 bp, synthetic construct
  source 1..1686: mol_type = other DNA
gcggccgcaaactacaagacagacttgcaaaagaaggcatgcacagctcagcactgctctgttgcctggtcctcctgactggggtgagggcccaggttcagctccaggagtcaggcggaggactcgttcaggctggaggatcactcaggctctcctgcgctgcatcaggcagagcagtgggaaactacatcatcggctggttcaggcaggcacccggaaaagagagggagtttgtggctaccaccacaagggacggaggctctaccttctacgccgacagtgtcaagggaagattcaccatcagcagggacaatgctaagaacaccgtgaacctgcagatgaacagcctggagcccgaagatactgctgtgtactattgtgccgccaagagctggagcgtgccattgaggcctacaagcgccgacttcgactcctggggacagggaacacaggtgaccgtgtcctctggtggtggcggatcaggtgggggaggctctggtggaggcggtagtcaggtgcagctgcaggagtccggcggaggcctcgtgcaggctggcggaagcctgaggctgagctgtgctgccagcggcagggccgtgggaaactatattattggatggttccggcaggcccccggaaaggagagagagtttgtggctacaactacaagggacgggggttctacattttacgccgacagtgtgaaagggagattcaccatcagtcgggacaacgccaagaatacagttaatctgcagatgaactccctggaacccgaggacactgccgtgtactattgcgcagccaaaagttggtctgtgcccttgcgacccactagcgccgacttcgatagctggggtcagggaacccaggttaccgttagttccggtggcggtggatctggaggcggaggtagtggtgggggaggttcacaggttcagctccagcagtcaggcgcagagctcgctagaccaggagcttcagtcaaaatgtcctgcaagacaagcggctacacattcaccaggtacacaatgcactgggtcaaacagaggcccggccagggattggagtggattggatatatcaaccccagcaggggctacaccaactacaaccagaaattcaaggacaaagccaccctgaccaccgacaaatccagctccacagcatacatgcagttgagctccctgaccagcgaggactccgcagtttactactgcgccaggtactacgacgaccactactccctggattactggggccagggcacaaccctgaccgtttcttccggaggcggtggaagtggcggaggagggtcagggggaggtggatctcagatcgtcctcacccagtccccatcctccctctctgcttccctcggagaaaaggtcaccatgacctgccgcgcctcctcttctgtctcctacatgaactggtaccagcagaaacccggcacctcccctaagcgatggatctacgacacctccaaggtcgccagtggcgtgcctgataggttcagcggatctggctccggcacctcttactccctcactatctcctccatggaagctgaagatgctgctacctactactgccagcagtggtcctccaaccccctgacatttggtgcaggcacaaaactcgaactcaaaggaggacatcatcatcatcaccattgattctaga

SEQ ID NO: 1111 - DNA, 1626 bp, synthetic construct
  source 1..1626: mol_type = other DNA
gcggccgcaaactacaagacagacttgcaaaagaaggcatgcacagctcagcactgctctgttgcctggtcctcctgactggggtgagggcccaggttcagctccaggagtcaggcggaggactcgttcagccaggagaaagcctcaggctctcatgcgccgcttccggaatcgcattcgaggtctttaacatgggctggtacagacaggctcccggcaaacagagggagctggttgctacaattaccaactccggggccaccaactacgccgatagcgttaagggaaggtttactatttccagggacaacgctaaggacaccctctacctccagatgaacagcctgaaacccgaagatactgctgtgtactattgcaacgcccagaactcctggaggaacatctggggccagggcacacaggtgaccgtttcatccggtggtggcggatcaggtgggggaggctctggtggaggcggtagtcaggtccagctccaggagagcggaggaggcctcgtgcagcccggcgaatccctgcggctgtcctgcgccgccagcggaatcgcttttgaggtgttcaatatgggatggtatcggcaggccccaggaaagcagagagagctggtcgccacaattaccaattccggagctaccaactacgcagactccgtgaagggtcggttcacaatctctcgcgataacgctaaagacaccctctacctgcagatgaacagcttgaagcccgaagatacagccgtgtactactgtaatgcccagaactcctggcgaaacatctggggccagggcacacaggtgactgtgtcctccggtggcggtggatctggaggcggaggtagtggtgggggaggttcacaggttcagctccagcagtcaggcgcagagctcgctagaccaggagcttcagtcaaaatgtcctgcaagacaagcggctacacattcaccaggtacacaatgcactgggtcaaacagaggcccggccagggattggagtggattggatatatcaaccccagcaggggctacaccaactacaaccagaaattcaaggacaaagccaccctgaccaccgacaaatccagctccacagcatacatgcagttgagctccctgaccagcgaggactccgcagtttactactgcgccaggtactacgacgaccactactccctggattactggggccagggcacaaccctgaccgtttcttccggaggcggtggaagtggcggaggagggtcagggggaggtggatctcagatcgtcctcacccagtccccatcctccctctctgcttccctcggagaaaaggtcaccatgacctgccgcgcctcctcttctgtctcctacatgaactggtaccagcagaaacccggcacctcccctaagcgatggatctacgacacctccaaggtcgccagtggcgtgcctgataggttcagcggatctggctccggcacctcttactccctcactatctcctccatggaagctgaagatgctgctacctactactgccagcagtggtcctccaaccccctgacatttggtgcaggcacaaaactcgaactcaaaggaggacatcatcatcatcaccattgattctaga

SEQ ID NO: 1112 - DNA, 801 bp, synthetic construct
  source 1..801: mol_type = other DNA
gcggccgcaaactacaagacagacttgcaaaagaaggcatgcacagctcagcactgctctgttgcctggtcctcctgactggggtgagggcccaggttcagctcgtccagccaggtgcagaagtcgtcaaacccggcgcttcagtcaaaatgtcctgcaaagcatcaggctacacattcaccaactactggatcaactgggtcaaacagaggcccggccagggtttggagtggattggagatatttaccccggcggaggcattaccaactacaacgaaaagttcaagaccaaggccaccctcaccttggacacctccacctcaaccgtgtacatggagctcagcagcctgaggagcgaggacacagcagtgtactactgcagccgatcctacggcaagtacttcgactactggggccagggcaccttgctcacagtgtctagcgctagcaccaaaggaccctccgtgtttcccctggccccctcttccaagtccacctccggcggaaccgccgctctgggatgtctggtgaaagattattttcccgagcccgtgaccgtgtcttggaacagcggagccctgacctccggcgtgcacacatgtcccgccgtgctgcagtctagtggcctgtattctctgtcctccgtggtgaccgtgccttcctcttccctgggcacccagacctacatctgtaacgtgaaccacaagccttccaacaccaaagtggataaaaaggtggagcccaagagctctgacaagacccacaccggaggacatcatcatcatcaccattgattctaga

SEQ ID NO: 1113 - DNA, 1521 bp, synthetic construct
  source 1..1521: mol_type = other DNA
gcggccgcaaactacaagacagacttgcaaaagaaggcatgcacagctcagcactgctctgttgcctggtcctcctgactggggtgagggccgatatccagatgacccagtccccctcctccatgtacgcctctgtgggagaaagagttaccatcacctgtaaagcctcccaggacattaaaagctacttgacctggtaccagaagaagcccggcaaaagccccaaaaccctcatcttctactccacccggctggctgacggcgttccttctaggttctccggctccggatctggccaggatttctccctgactatctccagcctggaacccgaagatactgctacctactactgcctccagcacgacgagtccccctttaccttcggcggaggtacaaaattggaaatcaaacgtacggtggctgcaccatctgtcttcatcttcccgccatctgatgagcagttgaaatctggaactgcctctgttgtgtgcctgctgaataacttctatcccagagaggccaaagtacagtggaaggtggataacgccctccaatcgggtaactcccaggagagtgtcacagagcaggacagcaaggacagcacctacagcctctgtagcaccctgacgctgagcaaagcagactacgagaaacacaaagtctacgcctgcgaagtcacccatcagggcctgagttcgcccgtcacaaagagcttcaacaggggagagtctggtggtggcggatcaggtgggggaggctctggtggaggcggtagtgatatccagatgacccagtccccctcctccctgtctgcttctgtgggagacagagtgaccattacctgtagagcctcccaggacatccgcaactacctgaactggtaccagcagaagcccggcaaagccccaaagctcctcatctactacacctcccggctggaatccggcgtgccttctaggttctccggctcaggaagcggcaccgattacaccctgactatctcctccctccagcccgaagatttcgccacctactactgccagcagggcaacaccctgccctggacattcggtcagggcacaaaggtcgaaatcaagggtggcggtggatctggaggcggaggtagtggtgggggaggttcagaagtgcagctggtggagagcggaggaggattggtgcagcctggaggaagcctgaggctgagttgtgccgctagcggatactcctttaccgggtacacaatgaactgggtgaggcaggcccccggaaagggattggaatgggtggcactgattaaccccaccaagggagtctcaacctacaaccagaaattcaaggaccgcttcaccatttccgtggacaaaagcaagaacaccgcctacctgcagatgaactccctgagagccgaagatactgctgtgtactattgtgcccggtccggctactacggggactctgattggtacttcgacgtgtggggccagggaaccttggtgacagtgtcctcctgattctaga

SEQ ID NO: 1114 - DNA, 801 bp, synthetic construct
  source 1..801: mol_type = other DNA
gcggccgcaaactacaagacagacttgcaaaagaaggcatgcacagctcagcactgctctgttgcctggtcctcctgactggggtgagggcccaggttcagctcgtccagagcggagcagaggtcaaaaagcccggcgcctccgtgaaggtgtcctgcaaggcctccggctacaccttcaccaactactggatcaactgggtgaggcaggcccccggccagggcctggagtggatgggcgacatctaccccggcggcggcatcaccaactacgcccagaagttccagggcagggtgaccatgaccagggacacctccatctccaccgcctacatggagctgtcctccctgaggtccgaggacaccgccgtgtactactgcgccaggtcctacggcaagtacttcgactactggggccagggcaccctggtgaccgtgtcctccgctagcaccaaaggaccctccgtgtttcccctggccccctcttccaagtccacctccggcggaaccgccgctctgggatgtctggtgaaagattattttcccgagcccgtgaccgtgtcttggaacagcggagccctgacctccggcgtgcacacatgtcccgccgtgctgcagtctagtggcctgtattctctgtcctccgtggtgaccgtgccttcctcttccctgggcacccagacctacatctgtaacgtgaaccacaagccttccaacaccaaagtggataaaaaggtggagcccaagagctctgacaagacccacaccggaggacatcatcatcatcaccattgattctaga

SEQ ID NO: 1115 - DNA, 1521 bp, synthetic construct
  source 1..1521: mol_type = other DNA
gcggccgcaaactacaagacagacttgcaaaagaaggcatgcacagctcagcactgctctgttgcctggtcctcctgactggggtgagggccgatatccagatgacccagtccccctcctccctgtctgcttctgtgggagacagagtgaccattacctgtaaagctagccaggacatcaagagctacctgacctggtaccagcagaagcccggcaaagccccaaaactgctcatctactactccacccggctcgccgacggagttccttctaggttctccggatcaggctccggcacagacttcaccctgactatctcctccctgcagcccgaggacttcgctacttactactgcctccagcacgacgaatctccattcaccttcggcggcggtaccaaggttgagatcaaacgtacggtggctgcaccatctgtcttcatcttcccgccatctgatgagcagttgaaatctggaactgcctctgttgtgtgcctgctgaataacttctatcccagagaggccaaagtacagtggaaggtggataacgccctccaatcgggtaactcccaggagagtgtcacagagcaggacagcaaggacagcacctacagcctctgtagcaccctgacgctgagcaaagcagactacgagaaacacaaagtctacgcctgcgaagtcacccatcagggcctgagttcgcccgtcacaaagagcttcaacaggggagagtctggtggtggcggatcaggtgggggaggctctggtggaggcggtagtgatatccagatgacccagtccccctcctccctgtctgcttctgtgggagacagagtgaccattacctgtagagcctcccaggacatccgcaactacctgaactggtaccagcagaagcccggcaaagccccaaagctcctcatctactacacctcccggctggaatccggcgtgccttctaggttctccggctcaggaagcggcaccgattacaccctgactatctcctccctccagcccgaagatttcgccacctactactgccagcagggcaacaccctgccctggacattcggtcagggcacaaaggtcgaaatcaagggtggcggtggatctggaggcggaggtagtggtgggggaggttcagaagtgcagctggtggagagcggaggaggattggtgcagcctggaggaagcctgaggctgagttgtgccgctagcggatactcctttaccgggtacacaatgaactgggtgaggcaggcccccggaaagggattggaatgggtggcactgattaaccccaccaagggagtctcaacctacaaccagaaattcaaggaccgcttcaccatttccgtggacaaaagcaagaacaccgcctacctgcagatgaactccctgagagccgaagatactgctgtgtactattgtgcccggtccggctactacggggactctgattggtacttcgacgtgtggggccagggaaccttggtgacagtgtcctcctgattctaga

SEQ ID NO: 1116 - DNA, 801 bp, synthetic construct
  source 1..801: mol_type = other DNA
gcggccgcaaactacaagacagacttgcaaaagaaggcatgcacagctcagcactgctctgttgcctggtcctcctgactggggtgagggcccaggttcagctcgtccagagcggagcagaggtcaaaaagcccggcgcctccgtgaaggtgtcctgcaaggcctccggctacaccttcaccaactactggatcaactgggtgaggcaggcccccggccagggcctggagtggatcggcgacatctaccccggcggcggcatcaccaactacaacgagaagttcaagaccaaggccaccctgaccctggacacctccacctccaccgtgtacatggagctgtcctccctgacctccgaggacaccgccgtgtactactgctccaggtcctacggcaagtacttcgactactggggccagggcaccctggtgaccgtgtcctccgctagcaccaaaggaccctccgtgtttcccctggccccctcttccaagtccacctccggcggaaccgccgctctgggatgtctggtgaaagattattttcccgagcccgtgaccgtgtcttggaacagcggagccctgacctccggcgtgcacacatgtcccgccgtgctgcagtctagtggcctgtattctctgtcctccgtggtgaccgtgccttcctcttccctgggcacccagacctacatctgtaacgtgaaccacaagccttccaacaccaaagtggataaaaaggtggagcccaagagctctgacaagacccacaccggaggacatcatcatcatcaccattgattctaga

SEQ ID NO: 1117 - DNA, 1521 bp, synthetic construct
  source 1..1521: mol_type = other DNA
gcggccgcaaactacaagacagacttgcaaaagaaggcatgcacagctcagcactgctctgttgcctggtcctcctgactggggtgagggccgatatccagatgacccagtccccctcctccctgtctgcttctgtgggagacagagtgaccattacctgtaaagctagccaggacatcaagagctacctgacctggtaccagcagaagcccggcaaagccccaaaaaccctgatcttctactccaccaggctggccgacggcgtgccctccaggttctccggctccggctccggccaggacttcaccctgaccatctcctccctgcagcccgaggacttcgccacctactactgcctgcagcacgacgagtcccccttcaccttcggcggcggcaccaaggtggagatcaagcgtacggtggctgcaccatctgtcttcatcttcccgccatctgatgagcagttgaaatctggaactgcctctgttgtgtgcctgctgaataacttctatcccagagaggccaaagtacagtggaaggtggataacgccctccaatcgggtaactcccaggagagtgtcacagagcaggacagcaaggacagcacctacagcctctgtagcaccctgacgctgagcaaagcagactacgagaaacacaaagtctacgcctgcgaagtcacccatcagggcctgagttcgcccgtcacaaagagcttcaacaggggagagtctggtggtggcggatcaggtgggggaggctctggtggaggcggtagtgatatccagatgacccagtccccctcctccctgtctgcttctgtgggagacagagtgaccattacctgtagagcctcccaggacatccgcaactacctgaactggtaccagcagaagcccggcaaagccccaaagctcctcatctactacacctcccggctggaatccggcgtgccttctaggttctccggctcaggaagcggcaccgattacaccctgactatctcctccctccagcccgaagatttcgccacctactactgccagcagggcaacaccctgccctggacattcggtcagggcacaaaggtcgaaatcaagggtggcggtggatctggaggcggaggtagtggtgggggaggttcagaagtgcagctggtggagagcggaggaggattggtgcagcctggaggaagcctgaggctgagttgtgccgctagcggatactcctttaccgggtacacaatgaactgggtgaggcaggcccccggaaagggattggaatgggtggcactgattaaccccaccaagggagtctcaacctacaaccagaaattcaaggaccgcttcaccatttccgtggacaaaagcaagaacaccgcctacctgcagatgaactccctgagagccgaagatactgctgtgtactattgtgcccggtccggctactacggggactctgattggtacttcgacgtgtggggccagggaaccttggtgacagtgtcctcctgattctaga

SEQ ID NO: 1118 - DNA, 1722 bp, synthetic construct
  source 1..1722: mol_type = other DNA
gcggccgcaaactacaagacagacttgcaaaagaaggcatgcacagctcagcactgctctgttgcctggtcctcctgactggggtgagggcccaggttcagctccaggagtcaggcggaggactcgttcaggctggaggatcactcaggctctcctgcgctgtctccggaaacaccctctccagatacgccatgggctggttcagacagacacccggaaacgagagggagtttgtggctgccatcagatggaacaatggcgccacctactacgccgactccgtcgaaggaaggtttaccatctcccgggactctggcaagaacaccgtgtacctgcagatgaacaatttgaagcccgaagatactgctgtgtactactgcgccggcaggttcctgggttacgctagttcaaacgcctaccacgaggccctgtataactacgactattggggccaggggacccaggtgacagtgtctagtggtggtggcggatcaggtgggggaggctctggtggaggcggtagtcaggtgcagctccaggagtccggaggcggcctggtgcaggctggcggctccctgaggctgtcctgtgctgtgagcggcaacaccctgtcccggtacgctatgggatggtttaggcagacccctggcaacgaacgggaatttgtggccgctatcaggtggaataacggtgctacctactacgccgacagtgtggaaggacggttcaccatcagtcgagattcaggaaagaatacagtttacctgcagatgaacaacttgaaacccgaggacactgcagtgtattactgcgctggaaggtttctgggttacgcaagtagtaacgcctaccacgaggcactgtacaattacgattactgggggcagggtacccaggtcactgtttcctctggtggcggtggatctggaggcggaggtagtggtgggggaggttcagatatccagatgacccagtccccctcctccctgtctgcttctgtgggagacagagtgaccattacctgtagagcctcccaggacatccgcaactacctgaactggtaccagcagaagcccggcaaagccccaaagctcctcatctactacacctcccggctggaatccggcgtgccttctaggttctccggctcaggaagcggcaccgattacaccctgactatctcctccctccagcccgaagatttcgccacctactactgccagcagggcaacaccctgccctggacattcggtcagggcacaaaggtcgaaatcaagggaggcggtggaagtggcggaggagggtcagggggaggtggatctgaagtgcagctggtggagagcggaggaggattggtgcagcctggaggaagcctgaggctgagttgtgccgctagcggatactcctttaccgggtacacaatgaactgggtgaggcaggcccccggaaagggattggaatgggtggcactgattaaccccaccaagggagtctcaacctacaaccagaaattcaaggaccgcttcaccatttccgtggacaaaagcaagaacaccgcctacctgcagatgaactccctgagagccgaagatactgctgtgtactattgtgcccggtccggctactacggggactctgattggtacttcgacgtgtggggccagggaaccttggtgacagtgtcctccggaggacatcatcatcatcaccattgattctaga

SEQ ID NO: 1119 - DNA, 2046 bp, synthetic construct
  source 1..2046: mol_type = other DNA
gcggccgcaaactacaagacagacttgcaaaagaaggcatgcacagctcagcactgctctgttgcctggtcctcctgactggggtgagggccggattgcagaaggctgtggtgaacttggaccccaagtgggtgagggtgttggaggaggacagcgtgacactgaggtgccagggaacatttagccctgaggacaacagtattaagtggtttcataacgagagtctgattccccaccaggacgcaaactatgtgattcagagcgcaagggtgaaggactccgggatgtacaggtgccagaccgctctgtccaccatcagcgaccctgttcagctggaggtgcacatgggctggctcttgctgcagaccaccaagtggctgtttcaggagggggaccctattcacctcaggtgccactcctggcagaacaggcctgtgaggaaagttacatacctgcagaacgggaaagggaaaaagtacttccacgagaactccgagctgctgatccccaaggccacccacaacgactccggctcctacttctgcaggggcctgatcggccacaacaacaagtcctccgcctccttcaggatctccctgggcgaccccggctccccctccatgttccccccctggcaccagggtggtggcggatcaggtgggggaggctctggtggaggcggtagtggcctgcagaaagccgtggtcaacctcgatcccaagtgggtcagggtgctcgaggaagattccgtgaccctccggtgtcagggaaccttctcccccgaggacaacagcattaaatggtttcacaacgaatcattgatccctcaccaggatgccaactacgtcatccagtctgccagggtgaaggactcaggcatgtatcgatgccagactgctctgtccaccatttccgaccctgtccagctcgaagtgcatatgggctggctcctgctccagacaacaaagtggctgttccaggagggcgaccccattcacctgaggtgccactcttggcagaatcgacccgttagaaaggtgacctacctccagaacggaaaaggcaagaaatactttcatgaaaacagcgagctgctgattcccaaggcaacccacaatgacagcgggagctacttctgtaggggactgattggacacaacaataagtctagtgcttcattcagaatttctttgggggaccccggttccccaagcatgttccccccctggcaccagggtggcggtggatctggaggcggaggtagtggtgggggaggttcagatatccagatgacccagtccccctcctccctgtctgcttctgtgggagacagagtgaccattacctgtagagcctcccaggacatccgcaactacctgaactggtaccagcagaagcccggcaaagccccaaagctcctcatctactacacctcccggctggaatccggcgtgccttctaggttctccggctcaggaagcggcaccgattacaccctgactatctcctccctccagcccgaagatttcgccacctactactgccagcagggcaacaccctgccctggacattcggtcagggcacaaaggtcgaaatcaagggaggcggtggaagtggcggaggagggtcagggggaggtggatctgaagtgcagctggtggagagcggaggaggattggtgcagcctggaggaagcctgaggctgagttgtgccgctagcggatactcctttaccgggtacacaatgaactgggtgaggcaggcccccggaaagggattggaatgggtggcactgattaaccccaccaagggagtctcaacctacaaccagaaattcaaggaccgcttcaccatttccgtggacaaaagcaagaacaccgcctacctgcagatgaactccctgagagccgaagatactgctgtgtactattgtgcccggtccggctactacggggactctgattggtacttcgacgtgtggggccagggaaccttggtgacagtgtcctccggaggacatcatcatcatcaccattgattctaga

SEQ ID NO: 1120 - DNA, 1656 bp, synthetic construct
  source 1..1656: mol_type = other DNA
gcggccgcaaactacaagacagacttgcaaaagaaggcatgcacagctcagcactgctctgttgcctggtcctcctgactggggtgagggcccaggttcagctccaggagtcaggcggaggactcgttcaggctggagacagtctcaggatctcctgcagagccagcggcttgacagtcaacgacctctacatgggctggttcaggcaggcacccggaaaagagagggagtttgtgggcagggtgacccctggtgacaacacagactacacctactacgtggacagtgtgaagggcaggtttactatcagcagggattccgcaaagaacacagtgtacctgcagatgaacagcttgaagctggaagatactgctgtgtacctgtgcgccgggaggagatttggctctagcgagtgggactactggggacaggggacacaggtgaccgtgtctagcggtggtggcggatcaggtgggggaggctctggtggaggcggtagtgatatccagatgacccagtccccctcctccctgtctgcttctgtgggagacagagtgaccattacctgtagagcctcccaggacatccgcaactacctgaactggtaccagcagaagcccggcaaagccccaaagctcctcatctactacacctcccggctggaatccggcgtgccttctaggttctccggctcaggaagcggcaccgattacaccctgactatctcctccctccagcccgaagatttcgccacctactactgccagcagggcaacaccctgccctggacattcggtcagggcacaaaggtcgaaatcaagggtggcggtggatctggaggcggaggtagtggtgggggaggttcagaagtgcagctggtggagagcggaggaggattggtgcagcctggaggaagcctgaggctgagttgtgccgctagcggatactcctttaccgggtacacaatgaactgggtgaggcaggcccccggaaagggattggaatgggtggcactgattaaccccaccaagggagtctcaacctacaaccagaaattcaaggaccgcttcaccatttccgtggacaaaagcaagaacaccgcctacctgcagatgaactccctgagagccgaagatactgctgtgtactattgtgcccggtccggctactacggggactctgattggtacttcgacgtgtggggccagggaaccttggtgacagtgtcctccggaggcggtggaagtggcggaggagggtcagggggaggtggatctgctgttcagttggtggagtccggaggaggattggtgcagcctggtaattctttgaggttgtcttgcgctgcttctgggtttacctttcggtcttttggtatgtcctgggtgaggcaggcccctggaaaggaacctgagtgggtgagctccatttccggctctggctctgacacactgtacgctgattccgttaagggccggttcacaatttctagggacaacgctaaaacaaccctctacctgcagatgaacagcttgaaacccgaggacaccgctgtttattactgcaccatcggcggctccctgagtaggtctagccagggaacccaggtcaccgtgtccagtggaggacatcatcatcatcaccattgattctaga

SEQ ID NO: 1121 - DNA, 1656 bp, synthetic construct
  source 1..1656: mol_type = other DNA
gcggccgcaaactacaagacagacttgcaaaagaaggcatgcacagctcagcactgctctgttgcctggtcctcctgactggggtgagggcccaggttcagctccaggagtcaggcggaggactcgttcaggctggagacagtctcaggatctcctgcagagccagcggcttgacagtcaacgacctctacatgggctggttcaggcaggcacccggaaaagagagggagtttgtgggcagggtgacccctggtgacaacacagactacacctactacgtggacagtgtgaagggcaggtttactatcagcagggattccgcaaagaacacagtgtacctgcagatgaacagcttgaagctggaagatactgctgtgtacctgtgcgccgggaggagatttggctctagcgagtgggactactggggacaggggacacaggtgaccgtgtctagcggtggtggcggatcaggtgggggaggctctggtggaggcggtagtgatatccagatgacccagtccccctcctccctgtctgcttctgtgggagacagagtgaccattacctgtagagcctcccaggacatccgcaactacctgaactggtaccagcagaagcccggcaaagccccaaagctcctcatctactacacctcccggctggaatccggcgtgccttctaggttctccggctcaggaagcggcaccgattacaccctgactatctcctccctccagcccgaagatttcgccacctactactgccagcagggcaacaccctgccctggacattcggtcagggcacaaaggtcgaaatcaagggtggcggtggatctggaggcggaggtagtggtgggggaggttcagaagtgcagctggtggagagcggaggaggattggtgcagcctggaggaagcctgaggctgagttgtgccgctagcggatactcctttaccgggtacacaatgaactgggtgaggcaggcccccggaaagggattggaatgggtggcactgattaaccccaccaagggagtctcaacctacaaccagaaattcaaggaccgcttcaccatttccgtggacaaaagcaagaacaccgcctacctgcagatgaactccctgagagccgaagatactgctgtgtactattgtgcccggtccggctactacggggactctgattggtacttcgacgtgtggggccagggaaccttggtgacagtgtcctccggaggcggtggaagtggcggaggagggtcagggggaggtggatctcaggttcagctccaggagtcaggcggaggactcgttcagccaggaggatcactcaggctctcctgcgaggcatcaggcttcacattctccaggttcggcatgacatgggtgcggcaggctcctggaaaaggcgttgagtgggtgagcggcatttcaagtttgggggacagcaccctgtacgccgacagtgttaaaggcaggttcaccatcagtagggacaacgccaagaacaccctgtatctgcagatgaatagcttgaagccagaggacaccgcagtgtactactgcaccatcggcggaagcctgaatcccggaggacagggaacccaggtgaccgttagtagcggaggacatcatcatcatcaccattgattctaga

SEQ ID NO: 1122 - DNA, 1578 bp, synthetic construct
  source 1..1578: mol_type = other DNA
gcggccgcaaactacaagacagacttgcaaaagaaggcatgcacagctcagcactgctctgttgcctggtcctcctgactggggtgagggcccaggttcagctccagcagtcaggcgcagagctcgctagaccaggagcttcagtcaaaatgtcctgcaagacaagcggctacacattcaccaggtacacaatgcactgggtcaaacagaggcccggccagggattggagtggattggatatatcaaccccagcaggggctacaccaactacaaccagaaattcaaggacaaagccaccctgaccaccgacaaatccagctccacagcatacatgcagttgagctccctgaccagcgaggactccgcagtttactactgcgccaggtactacgacgaccactactccctggattactggggccagggcacaaccctgaccgtttcttccgctagcaccaagggcccatcggtcttccccctggcatcttcctccaagagcacctctgggggcacagcggccctgggctgcctggtcaaggactacttccccgaaccggtgacggtgtcgtggaactcaggcgccctgaccagcggcgtgcacacctgtccggctgtcctacagtcctcaggactctactccctcagcagcgtggtgaccgtgccctccagcagcttgggcacccagacctacatctgcaacgtgaatcacgaacccagcaacaccaaggtggacaagaaagttgagcccaaatcttctgacaagacccacaccggtggtggcggatcaggtgggggaggctctggtggaggcggtagtgaagtgcagctgcagcagagcggagcagagttggtgaagccaggagcaagcgtgaagctgagctgcacaggaagcggattcaacatcaaggacacatacatctactggctgaagcagaggcccgagcagggattggagtggattggacggattgaccccgccaatggagacaccgaatacgaccccaagttccagggcaaagccacaatcagggccgacacaagttccaacacagcatacttgcagctgagctccctgaccagcgacgacacagtcgtgtactattgcgccaggaagtatggcaacaatagggcctggttcgccttctggggacagggaacactggtgacagtgtccgccggtggcggtggatctggaggcggaggtagtggtgggggaggttcacagatcgtcatgacccagacccccaaaagcctcctcgtgagcgcaggagacagggttaccatcacctgcaaagccagccagtcagtgtccgacgacgtcgcttggtaccagcagaagccaggccagtccccaaaactcctcatctacttcgcctcttacagatacaccggagtccccgaccgcttcacaggaagtggatacggcaccgactttaccctgaccatctcctccgtgcaggctgacgacgctgctgtttactactgccagcaggactacagctccccactgaccttcggagccggtacaaaagtggagttgaagggaggacatcatcatcatcaccattgattctaga

SEQ ID NO: 1123 - DNA, 1512 bp, synthetic construct
  source 1..1512: mol_type = other DNA
gcggccgcaaactacaagacagacttgcaaaagaaggcatgcacagctcagcactgctctgttgcctggtcctcctgactggggtgagggcccagatcgtcctcacccagtccccatcctccctctctgcttccctcggagaaaaggtcaccatgacctgccgcgcctcctcttctgtctcctacatgaactggtaccagcagaaacccggcacctcccctaagcgatggatctacgacacctccaaggtcgccagtggcgtgcctgataggttcagcggatctggctccggcacctcttactccctcactatctcctccatggaagctgaagatgctgctacctactactgccagcagtggtcctccaaccccctgacatttggtgcaggcacaaaactcgaactcaaacgtacggtggctgcaccatctgtcttcatcttcccgccatctgatgagcagttgaaatctggaactgcctctgttgtgtgcctgctgaataacttctatcccagagaggccaaagtacagtggaaggtggataacgccctccaatcgggtaactcccaggagagtgtcacagagcaggacagcaaggacagcacctacagcctctgtagcaccctgacgctgagcaaagcagactacgagaaacacaaagtctacgcctgcgaagtcacccatcagggcctgagttcgcccgtcacaaagagcttcaacaggggagagtctggtggtggcggatcaggtgggggaggctctggtggaggcggtagtgaagtgcagctgcagcagagcggagcagagttggtgaagccaggagcaagcgtgaagctgagctgcacaggaagcggattcaacatcaaggacacatacatctactggctgaagcagaggcccgagcagggattggagtggattggacggattgaccccgccaatggagacaccgaatacgaccccaagttccagggcaaagccacaatcagggccgacacaagttccaacacagcatacttgcagctgagctccctgaccagcgacgacacagtcgtgtactattgcgccaggaagtatggcaacaatagggcctggttcgccttctggggacagggaacactggtgacagtgtccgccggtggcggtggatctggaggcggaggtagtggtgggggaggttcacagatcgtcatgacccagacccccaaaagcctcctcgtgagcgcaggagacagggttaccatcacctgcaaagccagccagtcagtgtccgacgacgtcgcttggtaccagcagaagccaggccagtccccaaaactcctcatctacttcgcctcttacagatacaccggagtccccgaccgcttcacaggaagtggatacggcaccgactttaccctgaccatctcctccgtgcaggctgacgacgctgctgtttactactgccagcaggactacagctccccactgaccttcggagccggtacaaaagtggagttgaagtgattctaga

SEQ ID NO: 1124 - DNA, 756 bp, synthetic construct
  source 1..756: mol_type = other DNA
gcggccgcaaactacaagacagacttgcaaaagaaggcatgcacagctcagcactgctctgttgcctggtcctcctgactggggtgagggcccaggttcagctccagcagtcaggcgcagagctcgttaggccaggatcaagcgttaaaatctcctgcaaggcatcaggctacgcattctcctcctactggatgaactgggtgaaacagaggcccggacagggcttggagtggattggacagatttggcccggcgacggcgatacaaactacaacggcaaattcaagggcaaagccaccctgaccgccgacgaatctagtagcaccgcctacatgcagctgagctccctggctagcgaagattctgctgtgtacttctgcgccaggcgcgagacaaccaccgttggaagatattactacgccatggactactggggacagggcaccacagtgacagtgtcctccatccagaaccccgacccagctgtgtaccagctcagagactccaagtcctccgacaagtccgtgtgcctgttcaccgacttcgactcccagaccaacgtgtcccagtccaaggactccgacgtctacatcaccgacaaatgcgtgctcgacatgaggtccatggactttaagtccaactccgccgtggcctggtccaacaaatccgacttcgcctgcgccaacgccttcaacaactccatcatccccgaagatacttttttcccctcctccgacgtcccctcctgattctaga

SEQ ID NO: 1125 - DNA, 1617 bp, synthetic construct
  source 1..1617: mol_type = other DNA
gcggccgcaaactacaagacagacttgcaaaagaaggcatgcacagctcagcactgctctgttgcctggtcctcctgactggggtgagggccgatatccagctgacccagagccccgcttccttggctgtttccctgggacagagggccaccatctcctgtaaggccagccagtccgtggactacgacggagattcctacctgaactggtaccagcagatccccggccagcctcctaagttgttgatctacgacgcctccaacctggtgtccggcattccacctagattctctggaagcggcagcggcaccgacttcacattgaacattcaccccgtcgagaaggtcgacgccgcaacataccactgccagcagtccaccgaagatccttggaccttcggcggaggcaccaagttggagatcaaaaacgtgttccccccagaagtggccgtgttcgaaccctcaaaagccgagatcgcccacacccagaaggccacactggtgtgtctggcaaccggcttctaccccgaccacgttgagctgagctggtgggttaatggcaaggaggtgcactccggcgtgtgcacagaccctcagcctttgaaggagcagcccgctctcaatgacagcagatatgccctgtcctccagattgcgggtgtccgctactttctggcaggaccctcggaaccacttccgctgtcaggtgcagttctacgggctgagcgagaacgatgaatggacccaggacagggccaaacccgtgacacagattgtgtccgccgaggcttggggcagagctgattctggtggtggcggatcaggtgggggaggctctggtggaggcggtagtgatatccagatgacccagtccccctcctccctgtctgcttctgtgggagacagagtgaccattacctgtagagcctcccaggacatccgcaactacctgaactggtaccagcagaagcccggcaaagccccaaagctcctcatctactacacctcccggctggaatccggcgtgccttctaggttctccggctcaggaagcggcaccgattacaccctgactatctcctccctccagcccgaagatttcgccacctactactgccagcagggcaacaccctgccctggacattcggtcagggcacaaaggtcgaaatcaagggtggcggtggatctggaggcggaggtagtggtgggggaggttcagaagtgcagctggtggagagcggaggaggattggtgcagcctggaggaagcctgaggctgagttgtgccgctagcggatactcctttaccgggtacacaatgaactgggtgaggcaggcccccggaaagggattggaatgggtggcactgattaaccccaccaagggagtctcaacctacaaccagaaattcaaggaccgcttcaccatttccgtggacaaaagcaagaacaccgcctacctgcagatgaactccctgagagccgaagatactgctgtgtactattgtgcccggtccggctactacggggactctgattggtacttcgacgtgtggggccagggaaccttggtgacagtgtcctccggaggacatcatcatcatcaccattgattctaga

SEQ ID NO: 1126 - DNA, 1407 bp, synthetic construct
  source 1..1407: mol_type = other DNA
gcggccgcaaactacaagacagacttgcaaaagaaggcatgcacagctcagcactgctctgttgcctggtcctcctgactggggtgagggcccaggttcagctcaaagagagcggccccggactcgttgctccatctcagtcactctccatcacctgcacagtcagcggcttcagcctcacaggctacggagtgaactgggtgagacagccccccggaaaaggcttggagtggttgggaatgatttggggcgacggcagcacagactacaactccgctctgaagagtaggttgtccatcacaaaggacaatagcaagtcccaggtctttctgaagatgaacagtttgcagactgatgacaccgccaggtattactgcgccagggacggatactccaacttccactactacgtcatggactactggggccagggaacctccgtgactgtgtctagcgctagcaccaaaggaccctccgtgtttcccctggccccctcttccaagtccacctccggcggaaccgccgctctgggatgtctggtgaaagattattttcccgagcccgtgaccgtgtcttggaacagcggagccctgacctccggcgtgcacacatgtcccgccgtgctgcagtctagtggcctgtattctctgtcctccgtggtgaccgtgccttcctcttccctgggcacccagacctacatctgtaacgtgaaccacaagccttccaacaccaaagtggataaaaaggtggagcccaagagctctgacaagacccacaccggtggtggcggatcaggtgggggaggctctggtggaggcggtagtgctgctcctcctaaagctgtgttgaagttggaacccccctggattaatgttctgcaggaggattctgtgaccctgacttgtcagggcgcccgatctcctgagtccgattctattcagtggtttcacaacgggaatttgatccccactcatacccagccttcctaccgttttaaggccaacaacaatgactctggcgagtacacctgtcagaccggccagacatccctctccgaccctgttcacctgaccgtcctctccgaatggctcgtgctccagacccctcacctggaatttcaggaaggcgagacaattatgctgcgctgtcactcctggaaggacaagcccctcgtgaaggtgaccttcttccagaatggcaagtctcagaagttttcccacctcgaccccaccttctccatccctcaggctaaccactcccattccggcgactaccactgcaccggaaacatcggctacaccctgttctcctccaagcccgtcaccatcaccgtccaggtcccttctatgggctcctcctcccctatgggcatcggaggacatcatcatcatcaccattgattctaga

SEQ ID NO: 1127 - DNA, 1350 bp, synthetic construct
  source 1..1350: mol_type = other DNA
gcggccgcaaactacaagacagacttgcaaaagaaggcatgcacagctcagcactgctctgttgcctggtcctcctgactggggtgagggccgatatcgtgctgacccagtcccccgcttccttggctgtttccctgggacagagggccaccatctcctgtagggcttccgagtccgtggagtactacgtgacctccttgatgcagtggtaccagcagaaacccggccagcctcctaagctgttgatttccgccgcttccaacgtcgagtccggcgttcctgctcgtttttctgggagcggctccggaaccgacttttccttgaacatccaccccgtggaggaggacgacatcgcaatgtacttctgtcagcagtcccggaaggttccctggaccttcggaggaggtaccaagctggagatcaagcgtacggtggctgcaccatctgtcttcatcttcccgccatctgatgagcagttgaaatctggaactgcctctgttgtgtgcctgctgaataacttctatcccagagaggccaaagtacagtggaaggtggataacgccctccaatcgggtaactcccaggagagtgtcacagagcaggacagcaaggacagcacctacagcctctgtagcaccctgacgctgagcaaagcagactacgagaaacacaaagtctacgcctgcgaagtcacccatcagggcctgagttcgcccgtcacaaagagcttcaacaggggagagtctggtggtggcggatcaggtgggggaggctctggtggaggcggtagtgctgctcctcctaaagctgtgttgaagttggaacccccctggattaatgttctgcaggaggattctgtgaccctgacttgtcagggcgcccgatctcctgagtccgattctattcagtggtttcacaacgggaatttgatccccactcatacccagccttcctaccgttttaaggccaacaacaatgactctggcgagtacacctgtcagaccggccagacatccctctccgaccctgttcacctgaccgtcctctccgaatggctcgtgctccagacccctcacctggaatttcaggaaggcgagacaattatgctgcgctgtcactcctggaaggacaagcccctcgtgaaggtgaccttcttccagaatggcaagtctcagaagttttcccacctcgaccccaccttctccatccctcaggctaaccactcccattccggcgactaccactgcaccggaaacatcggctacaccctgttctcctccaagcccgtcaccatcaccgtccaggtcccttctatgggctcctcctcccctatgggcatctgattctaga

SEQ ID NO: 1128 - DNA, 1404 bp, synthetic construct
  source 1..1404: mol_type = other DNA
gcggccgcaaactacaagacagacttgcaaaagaaggcatgcacagctcagcactgctctgttgcctggtcctcctgactggggtgagggcccaggttcagctcgtccagagcggagcagaggtcaaaaagcccggcgcctccgtgaaggtgtcctgcaaggcctccggctacaccttcacctcctactacatccactgggtgaggcaggcccccggccagggcctggagtggatcggctgcatctaccccggcaacgtgaacaccaactacaacgagaagttcaaggacagggccaccctgaccgtggacacctccatctccaccgcctacatggagctgtccaggctgaggtccgacgacaccgccgtgtacttctgcaccaggtcccactacggcctggactggaacttcgacgtgtggggccagggcaccaccgtgaccgtgtcctccgctagcaccaaaggaccctccgtgtttcccctggccccctcttccaagtccacctccggcggaaccgccgctctgggatgtctggtgaaagattattttcccgagcccgtgaccgtgtcttggaacagcggagccctgacctccggcgtgcacacatgtcccgccgtgctgcagtctagtggcctgtattctctgtcctccgtggtgaccgtgccttcctcttccctgggcacccagacctacatctgtaacgtgaaccacaagccttccaacaccaaagtggataaaaaggtggagcccaagagctctgacaagacccacaccggtggtggcggatcaggtgggggaggctctggtggaggcggtagtgctgctcctcctaaagctgtgttgaagttggaacccccctggattaatgttctgcaggaggattctgtgaccctgacttgtcagggcgcccgatctcctgagtccgattctattcagtggtttcacaacgggaatttgatccccactcatacccagccttcctaccgttttaaggccaacaacaatgactctggcgagtacacctgtcagaccggccagacatccctctccgaccctgttcacctgaccgtcctctccgaatggctcgtgctccagacccctcacctggaatttcaggaaggcgagacaattatgctgcgctgtcactcctggaaggacaagcccctcgtgaaggtgaccttcttccagaatggcaagtctcagaagttttcccacctcgaccccaccttctccatccctcaggctaaccactcccattccggcgactaccactgcaccggaaacatcggctacaccctgttctcctccaagcccgtcaccatcaccgtccaggtcccttctatgggctcctcctcccctatgggcatcggaggacatcatcatcatcaccattgattctaga

SEQ ID NO: 1129 - DNA, 1338 bp, synthetic construct
  source 1..1338: mol_type = other DNA
gcggccgcaaactacaagacagacttgcaaaagaaggcatgcacagctcagcactgctctgttgcctggtcctcctgactggggtgagggccgatatccagatgacccagtccccctcctccctgtctgcttctgtgggagacagagtgaccattacctgtcacgcttcccagaacatttacgtgtggctgaactggtaccagcagaagcccggcaaggcccctaaactcctcatctacaaagcctccaacctgcacaccggcgtgccatctcgattctccggaagcggaagcggcaccgatttcaccctgactatctcctccctgcagcccgaagatttcgccacctactactgccagcagggccagacatacccctacaccttcggcggagggaccaaagtggagatcaagcgtacggtggctgcaccatctgtcttcatcttcccgccatctgatgagcagttgaaatctggaactgcctctgttgtgtgcctgctgaataacttctatcccagagaggccaaagtacagtggaaggtggataacgccctccaatcgggtaactcccaggagagtgtcacagagcaggacagcaaggacagcacctacagcctctgtagcaccctgacgctgagcaaagcagactacgagaaacacaaagtctacgcctgcgaagtcacccatcagggcctgagttcgcccgtcacaaagagcttcaacaggggagagtctggtggtggcggatcaggtgggggaggctctggtggaggcggtagtgctgctcctcctaaagctgtgttgaagttggaacccccctggattaatgttctgcaggaggattctgtgaccctgacttgtcagggcgcccgatctcctgagtccgattctattcagtggtttcacaacgggaatttgatccccactcatacccagccttcctaccgttttaaggccaacaacaatgactctggcgagtacacctgtcagaccggccagacatccctctccgaccctgttcacctgaccgtcctctccgaatggctcgtgctccagacccctcacctggaatttcaggaaggcgagacaattatgctgcgctgtcactcctggaaggacaagcccctcgtgaaggtgaccttcttccagaatggcaagtctcagaagttttcccacctcgaccccaccttctccatccctcaggctaaccactcccattccggcgactaccactgcaccggaaacatcggctacaccctgttctcctccaagcccgtcaccatcaccgtccaggtcccttctatgggctcctcctcccctatgggcatctgattctaga

SEQ ID NO: 1130 - DNA, 1404 bp, synthetic construct
  source 1..1404: mol_type = other DNA
gcggccgcaaactacaagacagacttgcaaaagaaggcatgcacagctcagcactgctctgttgcctggtcctcctgactggggtgagggcccaggttaaactccagcagagcggcccaggactcgtcacaccttctcagtcactctccatcacatgcaccgtctccggcttctccctctccgattacggcgtccactgggtcaggcagtcccctggacagggattggaatggctcggagtgatttgggccggcggaggaacaaactacaactccgcactgatgtctaggaagtccatctccaaggataatagtaagtctcaggtctttctgaagatgaacagcctgcaggccgatgataccgccgtttactattgcgccagggacaaaggctactcctactactacagcatggactactgggggcagggaaccaccgtgacagtttcctccgctagcaccaaaggaccctccgtgtttcccctggccccctcttccaagtccacctccggcggaaccgccgctctgggatgtctggtgaaagattattttcccgagcccgtgaccgtgtcttggaacagcggagccctgacctccggcgtgcacacatgtcccgccgtgctgcagtctagtggcctgtattctctgtcctccgtggtgaccgtgccttcctcttccctgggcacccagacctacatctgtaacgtgaaccacaagccttccaacaccaaagtggataaaaaggtggagcccaagagctctgacaagacccacaccggtggtggcggatcaggtgggggaggctctggtggaggcggtagtgctgctcctcctaaagctgtgttgaagttggaacccccctggattaatgttctgcaggaggattctgtgaccctgacttgtcagggcgcccgatctcctgagtccgattctattcagtggtttcacaacgggaatttgatccccactcatacccagccttcctaccgttttaaggccaacaacaatgactctggcgagtacacctgtcagaccggccagacatccctctccgaccctgttcacctgaccgtcctctccgaatggctcgtgctccagacccctcacctggaatttcaggaaggcgagacaattatgctgcgctgtcactcctggaaggacaagcccctcgtgaaggtgaccttcttccagaatggcaagtctcagaagttttcccacctcgaccccaccttctccatccctcaggctaaccactcccattccggcgactaccactgcaccggaaacatcggctacaccctgttctcctccaagcccgtcaccatcaccgtccaggtcccttctatgggctcctcctcccctatgggcatcggaggacatcatcatcatcaccattgattctaga

SEQ ID NO: 1131 - DNA, 1350 bp, synthetic construct
  source 1..1350: mol_type = other DNA
gcggccgcaaactacaagacagacttgcaaaagaaggcatgcacagctcagcactgctctgttgcctggtcctcctgactggggtgagggccgatatcgagctgacccagtcccccgcttccttggctgtttccctgggacagagggctaccatctcctgcagagcctccgagtccgtggagtactacgtgaccagcctgatgcagtggtaccagcagaaacccggccagcctcctaagctgttgatttttgccgcttccaacgtcgaatccggcgtgcctgctcgtttttccgggtctggaagcggcaccaacttctccctcaacatccaccccgtggacgaggacgacgtcgctatgtacttctgccagcagtcccggaaggtgccctataccttcggtggcggtaccaagttggaaatcaagcgtacggtggctgcaccatctgtcttcatcttcccgccatctgatgagcagttgaaatctggaactgcctctgttgtgtgcctgctgaataacttctatcccagagaggccaaagtacagtggaaggtggataacgccctccaatcgggtaactcccaggagagtgtcacagagcaggacagcaaggacagcacctacagcctctgtagcaccctgacgctgagcaaagcagactacgagaaacacaaagtctacgcctgcgaagtcacccatcagggcctgagttcgcccgtcacaaagagcttcaacaggggagagtctggtggtggcggatcaggtgggggaggctctggtggaggcggtagtgctgctcctcctaaagctgtgttgaagttggaacccccctggattaatgttctgcaggaggattctgtgaccctgacttgtcagggcgcccgatctcctgagtccgattctattcagtggtttcacaacgggaatttgatccccactcatacccagccttcctaccgttttaaggccaacaacaatgactctggcgagtacacctgtcagaccggccagacatccctctccgaccctgttcacctgaccgtcctctccgaatggctcgtgctccagacccctcacctggaatttcaggaaggcgagacaattatgctgcgctgtcactcctggaaggacaagcccctcgtgaaggtgaccttcttccagaatggcaagtctcagaagttttcccacctcgaccccaccttctccatccctcaggctaaccactcccattccggcgactaccactgcaccggaaacatcggctacaccctgttctcctccaagcccgtcaccatcaccgtccaggtcccttctatgggctcctcctcccctatgggcatctgattctaga

SEQ ID NO: 1132 - DNA, 1389 bp, synthetic construct
  source 1..1389: mol_type = other DNA
gcggccgcaaactacaagacagacttgcaaaagaaggcatgcacagctcagcactgctctgttgcctggtcctcctgactggggtgagggccgaagtgcagctgcagcagagcggacctgagttggtgaagcccggagctagcgtgaagatgtcctgcaaggcaagcggatacacatttaccagctacgtgatccagtgggtgaagcagaagcctggccagggactggagtggatcggatctattaacccctacaatgactataccaagtacaacgaaaagttcaagggcaaggccaccctgacctctgacaaatcctctatcaccgcatatatggagttctcctccctgaccagcgaggactccgctttgtactactgcgccaggtggggagacggcaactactggggaaggggaaccacactgaccgtgtcctccgctagcaccaaaggaccctccgtgtttcccctggccccctcttccaagtccacctccggcggaaccgccgctctgggatgtctggtgaaagattattttcccgagcccgtgaccgtgtcttggaacagcggagccctgacctccggcgtgcacacatgtcccgccgtgctgcagtctagtggcctgtattctctgtcctccgtggtgaccgtgccttcctcttccctgggcacccagacctacatctgtaacgtgaaccacaagccttccaacaccaaagtggataaaaaggtggagcccaagagctctgacaagacccacaccggtggtggcggatcaggtgggggaggctctggtggaggcggtagtgctgctcctcctaaagctgtgttgaagttggaacccccctggattaatgttctgcaggaggattctgtgaccctgacttgtcagggcgcccgatctcctgagtccgattctattcagtggtttcacaacgggaatttgatccccactcatacccagccttcctaccgttttaaggccaacaacaatgactctggcgagtacacctgtcagaccggccagacatccctctccgaccctgttcacctgaccgtcctctccgaatggctcgtgctccagacccctcacctggaatttcaggaaggcgagacaattatgctgcgctgtcactcctggaaggacaagcccctcgtgaaggtgaccttcttccagaatggcaagtctcagaagttttcccacctcgaccccaccttctccatccctcaggctaaccactcccattccggcgactaccactgcaccggaaacatcggctacaccctgttctcctccaagcccgtcaccatcaccgtccaggtcccttctatgggctcctcctcccctatgggcatcggaggacatcatcatcatcaccattgattctaga

SEQ ID NO: 1133 - DNA, 1335 bp, synthetic construct
  source 1..1335: mol_type = other DNA
gcggccgcaaactacaagacagacttgcaaaagaaggcatgcacagctcagcactgctctgttgcctggtcctcctgactggggtgagggccgatatcgagatgacccagtcccccgccatcatgtccgcttctctgggagagagagtgacaatgacctgcaccgcctcctcctccgtgtctagttcctacttccactggtaccagcagaaacccggttcctcccccaagctgtgtatctactccacttccaacctggcctccggcgtgcctcctagattcagtggttccggctccacctcctactccctcacaatctcctccatggaggctgaggacgccgctacatacttctgccaccagtaccacagatcccccaccttcggcggtggaacaaagctggagactaagcgtacggtggctgcaccatctgtcttcatcttcccgccatctgatgagcagttgaaatctggaactgcctctgttgtgtgcctgctgaataacttctatcccagagaggccaaagtacagtggaaggtggataacgccctccaatcgggtaactcccaggagagtgtcacagagcaggacagcaaggacagcacctacagcctctgtagcaccctgacgctgagcaaagcagactacgagaaacacaaagtctacgcctgcgaagtcacccatcagggcctgagttcgcccgtcacaaagagcttcaacaggggagagtctggtggtggcggatcaggtgggggaggctctggtggaggcggtagtgctgctcctcctaaagctgtgttgaagttggaacccccctggattaatgttctgcaggaggattctgtgaccctgacttgtcagggcgcccgatctcctgagtccgattctattcagtggtttcacaacgggaatttgatccccactcatacccagccttcctaccgttttaaggccaacaacaatgactctggcgagtacacctgtcagaccggccagacatccctctccgaccctgttcacctgaccgtcctctccgaatggctcgtgctccagacccctcacctggaatttcaggaaggcgagacaattatgctgcgctgtcactcctggaaggacaagcccctcgtgaaggtgaccttcttccagaatggcaagtctcagaagttttcccacctcgaccccaccttctccatccctcaggctaaccactcccattccggcgactaccactgcaccggaaacatcggctacaccctgttctcctccaagcccgtcaccatcaccgtccaggtcccttctatgggctcctcctcccctatgggcatctgattctaga

SEQ ID NO: 1134 - DNA, 1407 bp, synthetic construct
  source 1..1407: mol_type = other DNA
gcggccgcaaactacaagacagacttgcaaaagaaggcatgcacagctcagcactgctctgttgcctggtcctcctgactggggtgagggccgatgtgcagctgcaggagagcggacctggattggtgaagccttcccagtccttgtccctgacctgcaccgtgaccggatattccattacctccgactatgcctggaactggattaggcagttccccggcaacaaactggagtggatgggttatatcagatactccggctccacctcctacaacccctccttgaagtcccgcatctccatcacccgggatacctccaagaaccagttcttcctccagctcaactccgtgactaccgaggacaccgccacctactactgcgcaagggactggccacgcccttcttactggtacttcgacgtgtggggcgccggaacaaccgttactgtgtcctccgctagcaccaaaggaccctccgtgtttcccctggccccctcttccaagtccacctccggcggaaccgccgctctgggatgtctggtgaaagattattttcccgagcccgtgaccgtgtcttggaacagcggagccctgacctccggcgtgcacacatgtcccgccgtgctgcagtctagtggcctgtattctctgtcctccgtggtgaccgtgccttcctcttccctgggcacccagacctacatctgtaacgtgaaccacaagccttccaacaccaaagtggataaaaaggtggagcccaagagctctgacaagacccacaccggtggtggcggatcaggtgggggaggctctggtggaggcggtagtgctgctcctcctaaagctgtgttgaagttggaacccccctggattaatgttctgcaggaggattctgtgaccctgacttgtcagggcgcccgatctcctgagtccgattctattcagtggtttcacaacgggaatttgatccccactcatacccagccttcctaccgttttaaggccaacaacaatgactctggcgagtacacctgtcagaccggccagacatccctctccgaccctgttcacctgaccgtcctctccgaatggctcgtgctccagacccctcacctggaatttcaggaaggcgagacaattatgctgcgctgtcactcctggaaggacaagcccctcgtgaaggtgaccttcttccagaatggcaagtctcagaagttttcccacctcgaccccaccttctccatccctcaggctaaccactcccattccggcgactaccactgcaccggaaacatcggctacaccctgttctcctccaagcccgtcaccatcaccgtccaggtcccttctatgggctcctcctcccctatgggcatcggaggacatcatcatcatcaccattgattctaga

SEQ ID NO: 1135 - DNA, 1338 bp, synthetic construct
  source 1..1338: mol_type = other DNA
gcggccgcaaactacaagacagacttgcaaaagaaggcatgcacagctcagcactgctctgttgcctggtcctcctgactggggtgagggccgatatccagaccacccagaccaccagctccctctctgcttccctgggagacagggttaccatctcctgccgggcaggacaggacatttccaactacctgaactggtaccagcagaagcccgacggcaccgttaaactcctgatctactacacctcccgcctgcactccggcgttccttctaggttcagcggaagcggctccggaaccgattactccctgactatctccaatttggagcaggaggacattgccacctacttctgccagcagggccacacactcccctggacattcggaggaggcacaaaactggaaatcaaacgtacggtggctgcaccatctgtcttcatcttcccgccatctgatgagcagttgaaatctggaactgcctctgttgtgtgcctgctgaataacttctatcccagagaggccaaagtacagtggaaggtggataacgccctccaatcgggtaactcccaggagagtgtcacagagcaggacagcaaggacagcacctacagcctctgtagcaccctgacgctgagcaaagcagactacgagaaacacaaagtctacgcctgcgaagtcacccatcagggcctgagttcgcccgtcacaaagagcttcaacaggggagagtctggtggtggcggatcaggtgggggaggctctggtggaggcggtagtgctgctcctcctaaagctgtgttgaagttggaacccccctggattaatgttctgcaggaggattctgtgaccctgacttgtcagggcgcccgatctcctgagtccgattctattcagtggtttcacaacgggaatttgatccccactcatacccagccttcctaccgttttaaggccaacaacaatgactctggcgagtacacctgtcagaccggccagacatccctctccgaccctgttcacctgaccgtcctctccgaatggctcgtgctccagacccctcacctggaatttcaggaaggcgagacaattatgctgcgctgtcactcctggaaggacaagcccctcgtgaaggtgaccttcttccagaatggcaagtctcagaagttttcccacctcgaccccaccttctccatccctcaggctaaccactcccattccggcgactaccactgcaccggaaacatcggctacaccctgttctcctccaagcccgtcaccatcaccgtccaggtcccttctatgggctcctcctcccctatgggcatctgattctaga

SEQ ID NO: 1136 - DNA, 1407 bp, synthetic construct
  source 1..1407: mol_type = other DNA
gcggccgcaaactacaagacagacttgcaaaagaaggcatgcacagctcagcactgctctgttgcctggtcctcctgactggggtgagggcccaggttcagctccaggagtcaggcccaggactcgttaaaccctccgagacactctccctgacatgcgcagtctcaggcttctccctcacctcctacggcgtccattggatcagacagccccccggaaaaggcctggagtggttgggagtcatctggcctggcggaggaaccaactttaactctgccctgatgtcccggctcacaatctccgaggatacctccaagaaccaggtcagcttaaaactgtctagcgtgacagccgctgataccgctgtgtactactgtgcccgcgacagggcttacggcaactacttgtacgcaatggactattggggccagggaaccctcgttaccgtgtcatccgctagcaccaaaggaccctccgtgtttcccctggccccctcttccaagtccacctccggcggaaccgccgctctgggatgtctggtgaaagattattttcccgagcccgtgaccgtgtcttggaacagcggagccctgacctccggcgtgcacacatgtcccgccgtgctgcagtctagtggcctgtattctctgtcctccgtggtgaccgtgccttcctcttccctgggcacccagacctacatctgtaacgtgaaccacaagccttccaacaccaaagtggataaaaaggtggagcccaagagctctgacaagacccacaccggtggtggcggatcaggtgggggaggctctggtggaggcggtagtgctgctcctcctaaagctgtgttgaagttggaacccccctggattaatgttctgcaggaggattctgtgaccctgacttgtcagggcgcccgatctcctgagtccgattctattcagtggtttcacaacgggaatttgatccccactcatacccagccttcctaccgttttaaggccaacaacaatgactctggcgagtacacctgtcagaccggccagacatccctctccgaccctgttcacctgaccgtcctctccgaatggctcgtgctccagacccctcacctggaatttcaggaaggcgagacaattatgctgcgctgtcactcctggaaggacaagcccctcgtgaaggtgaccttcttccagaatggcaagtctcagaagttttcccacctcgaccccaccttctccatccctcaggctaaccactcccattccggcgactaccactgcaccggaaacatcggctacaccctgttctcctccaagcccgtcaccatcaccgtccaggtcccttctatgggctcctcctcccctatgggcatcggaggacatcatcatcatcaccattgattctaga

SEQ ID NO: 1137 - DNA, 1350 bp, synthetic construct
  source 1..1350: mol_type = other DNA
gcggccgcaaactacaagacagacttgcaaaagaaggcatgcacagctcagcactgctctgttgcctggtcctcctgactggggtgagggccgatatccagatgacccagtccccctcctccctgtctgcttctgtgggagacagagtgaccattacctgtagagcctccgaaagcgttgaatactatgtgacctccctgatgcagtggtaccagcagaagcccggcaaggctcctaagctcctgatctacgctgctagcaacgtggactccggcgtgcctagtaggttttccggctccggaagcggcaccgatttcacactcaccatctcctccctgcagcccgaggatatcgccacatactactgccagcagtccaggaaggtgcccttcaccttcggcggaggaaccaaggtggaaatcaagcgtacggtggctgcaccatctgtcttcatcttcccgccatctgatgagcagttgaaatctggaactgcctctgttgtgtgcctgctgaataacttctatcccagagaggccaaagtacagtggaaggtggataacgccctccaatcgggtaactcccaggagagtgtcacagagcaggacagcaaggacagcacctacagcctctgtagcaccctgacgctgagcaaagcagactacgagaaacacaaagtctacgcctgcgaagtcacccatcagggcctgagttcgcccgtcacaaagagcttcaacaggggagagtctggtggtggcggatcaggtgggggaggctctggtggaggcggtagtgctgctcctcctaaagctgtgttgaagttggaacccccctggattaatgttctgcaggaggattctgtgaccctgacttgtcagggcgcccgatctcctgagtccgattctattcagtggtttcacaacgggaatttgatccccactcatacccagccttcctaccgttttaaggccaacaacaatgactctggcgagtacacctgtcagaccggccagacatccctctccgaccctgttcacctgaccgtcctctccgaatggctcgtgctccagacccctcacctggaatttcaggaaggcgagacaattatgctgcgctgtcactcctggaaggacaagcccctcgtgaaggtgaccttcttccagaatggcaagtctcagaagttttcccacctcgaccccaccttctccatccctcaggctaaccactcccattccggcgactaccactgcaccggaaacatcggctacaccctgttctcctccaagcccgtcaccatcaccgtccaggtcccttctatgggctcctcctcccctatgggcatctgattctaga

SEQ ID NO: 1138 - DNA, 1809 bp, synthetic construct
  source 1..1809: mol_type = other DNA
gcggccgcaaactacaagacagacttgcaaaagaaggcatgcacagctcagcactgctctgttgcctggtcctcctgactggggtgagggccgaagtgcagctggtggagagcggaggaggattggtgcagcctggaggaagcctgaagctgagctgcgctgctagcggatttacctttaacaaatatgccatgaactgggtgaggcaggcccccggaaaaggattggagtgggtggctaggattaggagcaagtacaacaactacgccacctactatgccgacagcgtgaaggaccgattcaccatctccagggacgacagcaaaaacaccgcctacctgcagatgaacaacctgaagaccgaggacaccgccgtgtactactgcgtgaggcacggcaacttcggcaactcctacatctcctactgggcctactggggccagggcaccctggtgaccgtgtcctccgctagcaccaagggcccatcggtcttccccctggcaccctcctccaagagcacctctgggggcacagcggccctgggctgcctggtcaaggactacttccccgaaccggtgacggtgtcgtggaactcaggcgccctgaccagcggcgtgcacaccttcccggctgtcctacagtcctcaggactctactccctcagcagcgtggtgaccgtgccctccagcagcttgggcacccagacctacatctgcaacgtgaatcacaagcccagcaacaccaaggtggacaagaaagttgagcccaaatcttctgacaagacccacaccggtggtggcggatcaggtgggggaggctctggtggaggcggtagtgctgctcctcctaaagctgtgttgaagttggaacccccctggattaatgttctgcaggaggattctgtgaccctgacttgtcagggcgcccgatctcctgagtccgattctattcagtggtttcacaacgggaatttgatccccactcatacccagccttcctaccgttttaaggccaacaacaatgactctggcgagtacacctgtcagaccggccagacatccctctccgaccctgttcacctgaccgtcctctccgaatggctcgtgctccagacccctcacctggaatttcaggaaggcgagacaattatgctgcgctgtcactcctggaaggacaagcccctcgtgaaggtgaccttcttccagaatggcaagtctcagaagttttcccacctcgaccccaccttctccatccctcaggctaaccactcccattccggcgactaccactgcaccggaaacatcggctacaccctgttctcctccaagcccgtcaccatcaccgtccaggtcccttctatgggctcctcctcccctatgggcatcggtggcggtggatctggaggcggaggtagtggtgggggaggttcagaagtgcagctggtggagagcggaggaggattggtgcagcctggaaactccctgaggctgtcctgcgctgctagcggatttaccttttcctcctttggaatgtcctgggtgaggcaggcccccggaaaaggattggagtgggtgagctccatttccggcagtggctccgacacactctacgctgattccgtgaagggccggttcaccatctccagggacaacgctaaaacaaccctgtacctgcagatgaactccttgaggcccgaggacaccgctgtgtattactgtaccatcggcggaagcctgtctaggagctctcagggaaccctcgtgaccgtgtcctccggaggacatcatcatcatcaccattgattctaga

SEQ ID NO: 1139 - DNA, 1341 bp, synthetic construct
  source 1..1341: mol_type = other DNA
gcggccgcaaactacaagacagacttgcaaaagaaggcatgcacagctcagcactgctctgttgcctggtcctcctgactggggtgagggcccagaccgtcgtgacccaggaaccctccctgaccgtgagccccggcggaacagtgaccctcacctgcggaagctccaccggagccgtgacctccggaaactaccccaactgggtccagcagaaacccggccaggcccccagaggcctgatcggaggaaccaagtttttggcccccggcacccccgccagattctccggatctttgctgggcgggaaagccgccctgactctgtccggcgtgcagcctgaggatgaggcagagtactactgtgtgctgtggtatagcaacagatgggtgttcggaggcggcaccaagctgaccgtcctgagccagcccaaagccgcccccagcgtgaccctcttccccccttccagtgaggagctgcaggctaacaaggccaccctcgtgtgcctggtgtctgatttctaccccggcgccgtgaccgtggcctggaaggctgacggctcccccgtgaaggtgggcgttgagacaactaagccctccaaacagagtaacaacaaatatgccgcctcctcctacctcagcctcacccccgaacagtggaaatcccacaggagctattcctgcagagtgacccatgaaggatcaaccgtggaaaagacagtggcccccgcagagtcctccggtggtggcggatcaggtgggggaggctctggtggaggcggtagtgctgctcctcctaaagctgtgttgaagttggaacccccctggattaatgttctgcaggaggattctgtgaccctgacttgtcagggcgcccgatctcctgagtccgattctattcagtggtttcacaacgggaatttgatccccactcatacccagccttcctaccgttttaaggccaacaacaatgactctggcgagtacacctgtcagaccggccagacatccctctccgaccctgttcacctgaccgtcctctccgaatggctcgtgctccagacccctcacctggaatttcaggaaggcgagacaattatgctgcgctgtcactcctggaaggacaagcccctcgtgaaggtgaccttcttccagaatggcaagtctcagaagttttcccacctcgaccccaccttctccatccctcaggctaaccactcccattccggcgactaccactgcaccggaaacatcggctacaccctgttctcctccaagcccgtcaccatcaccgtccaggtcccttctatgggctcctcctcccctatgggcatctgattctaga

SEQ ID NO: 1140 - DNA, 1800 bp, synthetic construct
  source 1..1800: mol_type = other DNA
gcggccgcaaactacaagacagacttgcaaaagaaggcatgcacagctcagcactgctctgttgcctggtcctcctgactggggtgagggccgaagtgcagctggtggagagcggaggaggattggtgcagcctggaggaagcctgaggctgagttgtgccgctagcggatactcctttaccgggtacacaatgaactgggtgaggcaggcccccggaaagggattggaatgggtggcactgattaaccccaccaagggagtctcaacctacaaccagaaattcaaggaccgcttcaccatttccgtggacaaaagcaagaacaccgcctacctgcagatgaactccctgagagccgaagacaccgccgtgtactactgcgctagatccggctactacggggactccgactggtacttcgacgtgtggggacagggaaccctcgtgactgttagtagcgctagcaccaaaggaccctccgtgtttcccctggccccctcttccaagtccacctccggcggaaccgccgctctgggatgtctggtgaaagattattttcccgagcccgtgaccgtgtcttggaacagcggagccctgacctccggcgtgcacacatgtcccgccgtgctgcagtctagtggcctgtattctctgtcctccgtggtgaccgtgccttcctcttccctgggcacccagacctacatctgtaacgtgaaccacaagccttccaacaccaaagtggataaaaaggtggagcccaagagctctgacaagacccacaccggtggtggcggatcaggtgggggaggctctggtggaggcggtagtgctgctcctcctaaagctgtgttgaagttggaacccccctggattaatgttctgcaggaggattctgtgaccctgacttgtcagggcgcccgatctcctgagtccgattctattcagtggtttcacaacgggaatttgatccccactcatacccagccttcctaccgttttaaggccaacaacaatgactctggcgagtacacctgtcagaccggccagacatccctctccgaccctgttcacctgaccgtcctctccgaatggctcgtgctccagacccctcacctggaatttcaggaaggcgagacaattatgctgcgctgtcactcctggaaggacaagcccctcgtgaaggtgaccttcttccagaatggcaagtctcagaagttttcccacctcgaccccaccttctccatccctcaggctaaccactcccattccggcgactaccactgcaccggaaacatcggctacaccctgttctcctccaagcccgtcaccatcaccgtccaggtcccttctatgggctcctcctcccctatgggcatcggtggcggtggatctggaggcggaggtagtggtgggggaggttcagaagtgcagctggtggagagcggaggaggattggtgcagcctggaaactccctgaggctgtcctgcgctgctagcggatttaccttttcctcctttggaatgtcctgggtgaggcaggcccccggaaaaggattggagtgggtgagctccatttccggcagtggctccgacacactctacgctgattccgtgaagggccggttcaccatctccagggacaacgctaaaacaaccctgtacctgcagatgaactccttgaggcccgaggacaccgctgtgtattactgtaccatcggcggaagcctgtctaggagctctcagggaaccctcgtgaccgtgtcctccggaggacatcatcatcatcaccattgattctaga

SEQ ID NO: 1141 - DNA, 1338 bp, synthetic construct
  source 1..1338: mol_type = other DNA
gcggccgcaaactacaagacagacttgcaaaagaaggcatgcacagctcagcactgctctgttgcctggtcctcctgactggggtgagggccgatatccagatgacccagtccccctcctccctgtctgcttctgtgggagaccgcgtgaccattacctgtagagcctcccaggacatccgcaactacctgaactggtaccagcagaagcccggcaaagccccaaaactgctcatctactacacctcccgcctggaatccggcgtgccttctaggttctccggctcaggaagcggcaccgattacaccctgactatctcctccctccagcccgaagatttcgccacctactactgccagcagggcaacaccctgccctggacattcggtcagggcacaaaggtcgaaatcaagcgtacggtggctgcaccatctgtcttcatcttcccgccatctgatgagcagttgaaatctggaactgcctctgttgtgtgcctgctgaataacttctatcccagagaggccaaagtacagtggaaggtggataacgccctccaatcgggtaactcccaggagagtgtcacagagcaggacagcaaggacagcacctacagcctctgtagcaccctgacgctgagcaaagcagactacgagaaacacaaagtctacgcctgcgaagtcacccatcagggcctgagttcgcccgtcacaaagagcttcaacaggggagagtctggtggtggcggatcaggtgggggaggctctggtggaggcggtagtgctgctcctcctaaagctgtgttgaagttggaacccccctggattaatgttctgcaggaggattctgtgaccctgacttgtcagggcgcccgatctcctgagtccgattctattcagtggtttcacaacgggaatttgatccccactcatacccagccttcctaccgttttaaggccaacaacaatgactctggcgagtacacctgtcagaccggccagacatccctctccgaccctgttcacctgaccgtcctctccgaatggctcgtgctccagacccctcacctggaatttcaggaaggcgagacaattatgctgcgctgtcactcctggaaggacaagcccctcgtgaaggtgaccttcttccagaatggcaagtctcagaagttttcccacctcgaccccaccttctccatccctcaggctaaccactcccattccggcgactaccactgcaccggaaacatcggctacaccctgttctcctccaagcccgtcaccatcaccgtccaggtcccttctatgggctcctcctcccctatgggcatctgattctaga

SEQ ID NO: 1142 - DNA, 1401 bp, synthetic construct
  source 1..1401: mol_type = other DNA
gcggccgcaaactacaagacagacttgcaaaagaaggcatgcacagctcagcactgctctgttgcctggtcctcctgactggggtgagggcccaggttcagctccagcagtcaggcgcagagctcgctagaccaggagcttcagtcaaaatgtcctgcaagacaagcggctacacattcaccaggtacacaatgcactgggtcaaacagaggcccggccagggattggagtggattggatatatcaaccccagcaggggctacaccaactacaaccagaaattcaaggacaaagccaccctgaccaccgacaaatccagctccacagcatacatgcagttgagctccctgaccagcgaggactccgcagtttactactgcgccaggtactacgacgaccactactccctggattactggggccagggcacaaccctgaccgtttcttccgctagcaccaaaggaccctccgtgtttcccctggccccctcttccaagtccacctccggcggaaccgccgctctgggatgtctggtgaaagattattttcccgagcccgtgaccgtgtcttggaacagcggagccctgacctccggcgtgcacacatgtcccgccgtgctgcagtctagtggcctgtattctctgtcctccgtggtgaccgtgccttcctcttccctgggcacccagacctacatctgtaacgtgaaccacaagccttccaacaccaaagtggataaaaaggtggagcccaagagctctgacaagacccacaccggtggtggcggatcaggtgggggaggctctggtggaggcggtagtgctgctcctcctaaagctgtgttgaagttggaacccccctggattaatgttctgcaggaggattctgtgaccctgacttgtcagggcgcccgatctcctgagtccgattctattcagtggtttcacaacgggaatttgatccccactcatacccagccttcctaccgttttaaggccaacaacaatgactctggcgagtacacctgtcagaccggccagacatccctctccgaccctgttcacctgaccgtcctctccgaatggctcgtgctccagacccctcacctggaatttcaggaaggcgagacaattatgctgcgctgtcactcctggaaggacaagcccctcgtgaaggtgaccttcttccagaatggcaagtctcagaagttttcccacctcgaccccaccttctccatccctcaggctaaccactcccattccggcgactaccactgcaccggaaacatcggctacaccctgttctcctccaagcccgtcaccatcaccgtccaggtcccttctatgggctcctcctcccctatgggcatcggaggacatcatcatcatcaccattgattctaga

SEQ ID NO: 1143 - DNA, 1335 bp, synthetic construct
  source 1..1335: mol_type = other DNA
gcggccgcaaactacaagacagacttgcaaaagaaggcatgcacagctcagcactgctctgttgcctggtcctcctgactggggtgagggcccagatcgtcctcacccagtccccctcctccctctccgcctccctcggtgaaaaagtcaccatgacctgccgcgcctcctcctccgtctcctacatgaactggtaccagcagaaacccggcacctcccccaaaagatggatctacgacacctccaaagtcgcctccggcgtgcccgaccgcttctctggatctggctccggcacctcctactccctgactatctcctccatggaagctgaagatgctgctacctactactgccagcagtggtcctccaatcccctcaccttcggcgccggcaccaagctggaactgaagcgtacggtggctgcaccatctgtcttcatcttcccgccatctgatgagcagttgaaatctggaactgcctctgttgtgtgcctgctgaataacttctatcccagagaggccaaagtacagtggaaggtggataacgccctccaatcgggtaactcccaggagagtgtcacagagcaggacagcaaggacagcacctacagcctctgtagcaccctgacgctgagcaaagcagactacgagaaacacaaagtctacgcctgcgaagtcacccatcagggcctgagttcgcccgtcacaaagagcttcaacaggggagagtctggtggtggcggatcaggtgggggaggctctggtggaggcggtagtgctgctcctcctaaagctgtgttgaagttggaacccccctggattaatgttctgcaggaggattctgtgaccctgacttgtcagggcgcccgatctcctgagtccgattctattcagtggtttcacaacgggaatttgatccccactcatacccagccttcctaccgttttaaggccaacaacaatgactctggcgagtacacctgtcagaccggccagacatccctctccgaccctgttcacctgaccgtcctctccgaatggctcgtgctccagacccctcacctggaatttcaggaaggcgagacaattatgctgcgctgtcactcctggaaggacaagcccctcgtgaaggtgaccttcttccagaatggcaagtctcagaagttttcccacctcgaccccaccttctccatccctcaggctaaccactcccattccggcgactaccactgcaccggaaacatcggctacaccctgttctcctccaagcccgtcaccatcaccgtccaggtcccttctatgggctcctcctcccctatgggcatctgattctaga

SEQ ID NO: 1144 - DNA, 1401 bp, synthetic construct
  source 1..1401: mol_type = other DNA
gcggccgcaaactacaagacagacttgcaaaagaaggcatgcacagctcagcactgctctgttgcctggtcctcctgactggggtgagggcccaggttcagctcgtccagagcggagcagaggtcaaaaagcccggcgcctccgtgaaggtgtcctgcaaggcctccggctacaccttcaccaggtactacatgcactgggtgaggcaggcccccggccagggcctggagtggatgggctacatcaacccctccaggggctacaccaactacgcccagaagttccagggcagggtgaccatgaccagggacacctccatctccaccgcctacatggagctgtcctccctgaggtccgaggacaccgccgtgtactactgcgccaggtactacgacgaccactactccctggactactggggccagggcaccctggtgaccgtgtcctccgctagcaccaaaggaccctccgtgtttcccctggccccctcttccaagtccacctccggcggaaccgccgctctgggatgtctggtgaaagattattttcccgagcccgtgaccgtgtcttggaacagcggagccctgacctccggcgtgcacacatgtcccgccgtgctgcagtctagtggcctgtattctctgtcctccgtggtgaccgtgccttcctcttccctgggcacccagacctacatctgtaacgtgaaccacaagccttccaacaccaaagtggataaaaaggtggagcccaagagctctgacaagacccacaccggtggtggcggatcaggtgggggaggctctggtggaggcggtagtgctgctcctcctaaagctgtgttgaagttggaacccccctggattaatgttctgcaggaggattctgtgaccctgacttgtcagggcgcccgatctcctgagtccgattctattcagtggtttcacaacgggaatttgatccccactcatacccagccttcctaccgttttaaggccaacaacaatgactctggcgagtacacctgtcagaccggccagacatccctctccgaccctgttcacctgaccgtcctctccgaatggctcgtgctccagacccctcacctggaatttcaggaaggcgagacaattatgctgcgctgtcactcctggaaggacaagcccctcgtgaaggtgaccttcttccagaatggcaagtctcagaagttttcccacctcgaccccaccttctccatccctcaggctaaccactcccattccggcgactaccactgcaccggaaacatcggctacaccctgttctcctccaagcccgtcaccatcaccgtccaggtcccttctatgggctcctcctcccctatgggcatcggaggacatcatcatcatcaccattgattctaga

SEQ ID NO: 1145 - DNA, 1335 bp, synthetic construct
  source 1..1335: mol_type = other DNA
gcggccgcaaactacaagacagacttgcaaaagaaggcatgcacagctcagcactgctctgttgcctggtcctcctgactggggtgagggccgatatccagatgacccagtccccctcctccctgtctgcttctgtgggagaccgcgtgaccattacctgtagagcctccagctcagtgtcctacatgaactggtaccagcagaagcccggcaaggcccctaaactcctgatctacgacacctccaaagtcgcctctggagtcccctcacgcttctctggatctggctccggaaccgacttcaccctgaccatctcctccctgcagcctgaggacttcgccacatactactgccagcagtggtcctccaatcccctgaccttcggtggcggtaccaaggttgagatcaaacgtacggtggctgcaccatctgtcttcatcttcccgccatctgatgagcagttgaaatctggaactgcctctgttgtgtgcctgctgaataacttctatcccagagaggccaaagtacagtggaaggtggataacgccctccaatcgggtaactcccaggagagtgtcacagagcaggacagcaaggacagcacctacagcctctgtagcaccctgacgctgagcaaagcagactacgagaaacacaaagtctacgcctgcgaagtcacccatcagggcctgagttcgcccgtcacaaagagcttcaacaggggagagtctggtggtggcggatcaggtgggggaggctctggtggaggcggtagtgctgctcctcctaaagctgtgttgaagttggaacccccctggattaatgttctgcaggaggattctgtgaccctgacttgtcagggcgcccgatctcctgagtccgattctattcagtggtttcacaacgggaatttgatccccactcatacccagccttcctaccgttttaaggccaacaacaatgactctggcgagtacacctgtcagaccggccagacatccctctccgaccctgttcacctgaccgtcctctccgaatggctcgtgctccagacccctcacctggaatttcaggaaggcgagacaattatgctgcgctgtcactcctggaaggacaagcccctcgtgaaggtgaccttcttccagaatggcaagtctcagaagttttcccacctcgaccccaccttctccatccctcaggctaaccactcccattccggcgactaccactgcaccggaaacatcggctacaccctgttctcctccaagcccgtcaccatcaccgtccaggtcccttctatgggctcctcctcccctatgggcatctgattctaga

SEQ ID NO: 1146 - DNA, 1404 bp, synthetic construct
  source 1..1404: mol_type = other DNA
gcggccgcaaactacaagacagacttgcaaaagaaggcatgcacagctcagcactgctctgttgcctggtcctcctgactggggtgagggcccaggttcagctcgtccagagcggagcagaggtcaaaaagcccggcgcctccgtgaaggtgtcctgcaaggcctccggctacaccttcatctcctacaccatgcactgggtgaggcaggcccccggccagggcctggagtggatgggctacatcaaccccaggtccggctacacccactacaaccagaagctgaaggacaaggccaccctgaccgccgacaagtccgcctccaccgcctacatggagctgtcctccctgaggtccgaggacaccgccgtgtactactgcgccaggtccgcctactacgactacgacggcttcgcctactggggccagggcaccctggtgaccgtgtcctccgctagcaccaaaggaccctccgtgtttcccctggccccctcttccaagtccacctccggcggaaccgccgctctgggatgtctggtgaaagattattttcccgagcccgtgaccgtgtcttggaacagcggagccctgacctccggcgtgcacacatgtcccgccgtgctgcagtctagtggcctgtattctctgtcctccgtggtgaccgtgccttcctcttccctgggcacccagacctacatctgtaacgtgaaccacaagccttccaacaccaaagtggataaaaaggtggagcccaagagctctgacaagacccacaccggtggtggcggatcaggtgggggaggctctggtggaggcggtagtgctgctcctcctaaagctgtgttgaagttggaacccccctggattaatgttctgcaggaggattctgtgaccctgacttgtcagggcgcccgatctcctgagtccgattctattcagtggtttcacaacgggaatttgatccccactcatacccagccttcctaccgttttaaggccaacaacaatgactctggcgagtacacctgtcagaccggccagacatccctctccgaccctgttcacctgaccgtcctctccgaatggctcgtgctccagacccctcacctggaatttcaggaaggcgagacaattatgctgcgctgtcactcctggaaggacaagcccctcgtgaaggtgaccttcttccagaatggcaagtctcagaagttttcccacctcgaccccaccttctccatccctcaggctaaccactcccattccggcgactaccactgcaccggaaacatcggctacaccctgttctcctccaagcccgtcaccatcaccgtccaggtcccttctatgggctcctcctcccctatgggcatcggaggacatcatcatcatcaccattgattctaga

SEQ ID NO: 1147 - DNA, 1335 bp, synthetic construct
  source 1..1335: mol_type = other DNA
gcggccgcaaactacaagacagacttgcaaaagaaggcatgcacagctcagcactgctctgttgcctggtcctcctgactggggtgagggccgatatccagatgacccagtccccctcctccctgtctgcttctgtgggagaccgcgtgaccattacctgttccgcttcctcttccgtgtcctacatgaactggtaccagcagaagcccggcaaggcccctaaaagactgatctacgacacctccaagctggccagcggagtcccttcaaggttctccggttccggctccggtactgacttcaccctgaccatttcctccctgcagcccgaggatttcgccacatactactgccagcagtggtcctccaacccccctacattcggcggaggtaccaaggtcgaaatcaagcgtacggtggctgcaccatctgtcttcatcttcccgccatctgatgagcagttgaaatctggaactgcctctgttgtgtgcctgctgaataacttctatcccagagaggccaaagtacagtggaaggtggataacgccctccaatcgggtaactcccaggagagtgtcacagagcaggacagcaaggacagcacctacagcctctgtagcaccctgacgctgagcaaagcagactacgagaaacacaaagtctacgcctgcgaagtcacccatcagggcctgagttcgcccgtcacaaagagcttcaacaggggagagtctggtggtggcggatcaggtgggggaggctctggtggaggcggtagtgctgctcctcctaaagctgtgttgaagttggaacccccctggattaatgttctgcaggaggattctgtgaccctgacttgtcagggcgcccgatctcctgagtccgattctattcagtggtttcacaacgggaatttgatccccactcatacccagccttcctaccgttttaaggccaacaacaatgactctggcgagtacacctgtcagaccggccagacatccctctccgaccctgttcacctgaccgtcctctccgaatggctcgtgctccagacccctcacctggaatttcaggaaggcgagacaattatgctgcgctgtcactcctggaaggacaagcccctcgtgaaggtgaccttcttccagaatggcaagtctcagaagttttcccacctcgaccccaccttctccatccctcaggctaaccactcccattccggcgactaccactgcaccggaaacatcggctacaccctgttctcctccaagcccgtcaccatcaccgtccaggtcccttctatgggctcctcctcccctatgggcatctgattctaga

SEQ ID NO: 1148 - DNA, 1401 bp, synthetic construct
  source 1..1401: mol_type = other DNA
gcggccgcaaactacaagacagacttgcaaaagaaggcatgcacagctcagcactgctctgttgcctggtcctcctgactggggtgagggccgaagtgcagctggtggagagcggaggaggattggtgaagccaggagggagtctgaggctgagttgcgctgctagcggatttacctttagttcctacggcatgttttgggtgaggcaggcccccggaaagggtttggaatgggtggctactatctccagatacagcaggtacatctactaccccgactccgtgaagggcagattcaccatttccagggacaacgctaagaactccctgtacttgcagatgaacagcctgagggccgaagacactgccgtgtactactgcgccaggaggcctttgtacgggtccagtccagactactggggccagggaacactggtgaccgtctcttccgctagcaccaaaggaccctccgtgtttcccctggccccctcttccaagtccacctccggcggaaccgccgctctgggatgtctggtgaaagattattttcccgagcccgtgaccgtgtcttggaacagcggagccctgacctccggcgtgcacacatgtcccgccgtgctgcagtctagtggcctgtattctctgtcctccgtggtgaccgtgccttcctcttccctgggcacccagacctacatctgtaacgtgaaccacaagccttccaacaccaaagtggataaaaaggtggagcccaagagctctgacaagacccacaccggtggtggcggatcaggtgggggaggctctggtggaggcggtagtgctgctcctcctaaagctgtgttgaagttggaacccccctggattaatgttctgcaggaggattctgtgaccctgacttgtcagggcgcccgatctcctgagtccgattctattcagtggtttcacaacgggaatttgatccccactcatacccagccttcctaccgttttaaggccaacaacaatgactctggcgagtacacctgtcagaccggccagacatccctctccgaccctgttcacctgaccgtcctctccgaatggctcgtgctccagacccctcacctggaatttcaggaaggcgagacaattatgctgcgctgtcactcctggaaggacaagcccctcgtgaaggtgaccttcttccagaatggcaagtctcagaagttttcccacctcgaccccaccttctccatccctcaggctaaccactcccattccggcgactaccactgcaccggaaacatcggctacaccctgttctcctccaagcccgtcaccatcaccgtccaggtcccttctatgggctcctcctcccctatgggcatcggaggacatcatcatcatcaccattgattctaga

SEQ ID NO: 1149 - DNA, 1335 bp, synthetic construct
  source 1..1335: mol_type = other DNA
gcggccgcaaactacaagacagacttgcaaaagaaggcatgcacagctcagcactgctctgttgcctggtcctcctgactggggtgagggccgaaatcgtgctgacccagtcccccgctaccttgagtctgtcccctggagagagagccaccctgtcttgtagtgctagtagctccgtgacatacgtgcactggtatcagcagaagcccggccaggctccaaggttgttgatctatgacacctccaaactggccagcggcatccctgcacgattctctggaagcgggtccggtaccgacttcaccttgactatctcctccctggaacccgaggacttcgcagtgtactactgcttccagggctccggctatcccctgacattcggaagcggtactaaactggagatcaagcgtacggtggctgcaccatctgtcttcatcttcccgccatctgatgagcagttgaaatctggaactgcctctgttgtgtgcctgctgaataacttctatcccagagaggccaaagtacagtggaaggtggataacgccctccaatcgggtaactcccaggagagtgtcacagagcaggacagcaaggacagcacctacagcctctgtagcaccctgacgctgagcaaagcagactacgagaaacacaaagtctacgcctgcgaagtcacccatcagggcctgagttcgcccgtcacaaagagcttcaacaggggagagtctggtggtggcggatcaggtgggggaggctctggtggaggcggtagtgctgctcctcctaaagctgtgttgaagttggaacccccctggattaatgttctgcaggaggattctgtgaccctgacttgtcagggcgcccgatctcctgagtccgattctattcagtggtttcacaacgggaatttgatccccactcatacccagccttcctaccgttttaaggccaacaacaatgactctggcgagtacacctgtcagaccggccagacatccctctccgaccctgttcacctgaccgtcctctccgaatggctcgtgctccagacccctcacctggaatttcaggaaggcgagacaattatgctgcgctgtcactcctggaaggacaagcccctcgtgaaggtgaccttcttccagaatggcaagtctcagaagttttcccacctcgaccccaccttctccatccctcaggctaaccactcccattccggcgactaccactgcaccggaaacatcggctacaccctgttctcctccaagcccgtcaccatcaccgtccaggtcccttctatgggctcctcctcccctatgggcatctgattctaga

SEQ ID NO: 1150 - DNA, 1401 bp, synthetic construct
  source 1..1401: mol_type = other DNA
gcggccgcaaactacaagacagacttgcaaaagaaggcatgcacagctcagcactgctctgttgcctggtcctcctgactggggtgagggccgaagtgcagctgctggagtccggaggaggattggtgcagcctggaggaagcctgaggctgtcttgtgccgctagcggttttacattttcctcctttcccatggcatgggtgagacaggcccccggaaaaggattggagtgggtgagcactatcagcaccagcgggggaaggacctactaccgtgattccgtgaagggccggtttaccatctcccgcgacaactccaagaacaccctctacctgcagatgaactccttgagggccgaggacaccgccgtttactattgcgccaagttcaggcagtacagtggaggctttgactactggggccagggcacactggtgacagtgtcttccgctagcaccaaaggaccctccgtgtttcccctggccccctcttccaagtccacctccggcggaaccgccgctctgggatgtctggtgaaagattattttcccgagcccgtgaccgtgtcttggaacagcggagccctgacctccggcgtgcacacatgtcccgccgtgctgcagtctagtggcctgtattctctgtcctccgtggtgaccgtgccttcctcttccctgggcacccagacctacatctgtaacgtgaaccacaagccttccaacaccaaagtggataaaaaggtggagcccaagagctctgacaagacccacaccggtggtggcggatcaggtgggggaggctctggtggaggcggtagtgctgctcctcctaaagctgtgttgaagttggaacccccctggattaatgttctgcaggaggattctgtgaccctgacttgtcagggcgcccgatctcctgagtccgattctattcagtggtttcacaacgggaatttgatccccactcatacccagccttcctaccgttttaaggccaacaacaatgactctggcgagtacacctgtcagaccggccagacatccctctccgaccctgttcacctgaccgtcctctccgaatggctcgtgctccagacccctcacctggaatttcaggaaggcgagacaattatgctgcgctgtcactcctggaaggacaagcccctcgtgaaggtgaccttcttccagaatggcaagtctcagaagttttcccacctcgaccccaccttctccatccctcaggctaaccactcccattccggcgactaccactgcaccggaaacatcggctacaccctgttctcctccaagcccgtcaccatcaccgtccaggtcccttctatgggctcctcctcccctatgggcatcggaggacatcatcatcatcaccattgattctaga

SEQ ID NO: 1151 - DNA, 1344 bp, synthetic construct
  source 1..1344: mol_type = other DNA
gcggccgcaaactacaagacagacttgcaaaagaaggcatgcacagctcagcactgctctgttgcctggtcctcctgactggggtgagggccgatttcatgttgacccagccccactccgtttccgagtcccctggaaagaccgttattatttcctgcaccctgtcctccggcaacatcgagaacaactacgtgcactggtaccagcagaggcccggaagagcaccaaccacagtcatcttcgacgacgacaagaggcccgatggcgttcctgacagattctccggcagtatcgacaggtcctccaactccgccagcctgacaatctccggcctgcagacagaggacgaggctgattactactgtcactcctacgtctcctctttcaacgtgttcggcggcggcaccaagctgacagttctctctcagcctaaagccgcaccatccgtcactctgttcccgccctcctctgaggagctccaagccaacaaggccacactagtgtgtctggttagtgacttctacccgggagctgtgacagtggcctggaaggcagatggcagccccgtcaaggttggagtggagaccaccaaaccctccaaacagagcaacaacaagtacgcggcctgtagctacctgagcctgacgcccgagcagtggaagtcccacagaagctacagctgcagagtcacgcatgaagggagcaccgtggagaagacagtggcccctgctgaatcctctggtggtggcggatcaggtgggggaggctctggtggaggcggtagtgctgctcctcctaaagctgtgttgaagttggaacccccctggattaatgttctgcaggaggattctgtgaccctgacttgtcagggcgcccgatctcctgagtccgattctattcagtggtttcacaacgggaatttgatccccactcatacccagccttcctaccgttttaaggccaacaacaatgactctggcgagtacacctgtcagaccggccagacatccctctccgaccctgttcacctgaccgtcctctccgaatggctcgtgctccagacccctcacctggaatttcaggaaggcgagacaattatgctgcgctgtcactcctggaaggacaagcccctcgtgaaggtgaccttcttccagaatggcaagtctcagaagttttcccacctcgaccccaccttctccatccctcaggctaaccactcccattccggcgactaccactgcaccggaaacatcggctacaccctgttctcctccaagcccgtcaccatcaccgtccaggtcccttctatgggctcctcctcccctatgggcatctgattctaga

SEQ ID NO: 1152 - DNA, 1413 bp, synthetic construct
  source 1..1413: mol_type = other DNA
gcggccgcaaactacaagacagacttgcaaaagaaggcatgcacagctcagcactgctctgttgcctggtcctcctgactggggtgagggcccaggttcagctccagcagtcagcagcagagctcgcaaggccaggagcatctgttaaaatgagctgtaaagcaagcggctacacattcaccaggtatacaatgcagtgggtgaaacagaggccaggccagggactcgagtggattggatacattaatcccagctccggatacatcggctactcccagaagttcaaagacaaaaccacactgaccgccgacaaaagcagcagcacagcatacatgcagctgtcctctctgacctccgaagacagcgccgtctactattgcgccaggtccaaggtctactacgactatgacgtctactccatggattactggggacagggaacctccgtgaccgtctcttccgctagcaccaaaggaccctccgtgtttcccctggccccctcttccaagtccacctccggcggaaccgccgctctgggatgtctggtgaaagattattttcccgagcccgtgaccgtgtcttggaacagcggagccctgacctccggcgtgcacacatgtcccgccgtgctgcagtctagtggcctgtattctctgtcctccgtggtgaccgtgccttcctcttccctgggcacccagacctacatctgtaacgtgaaccacaagccttccaacaccaaagtggataaaaaggtggagcccaagagctctgacaagacccacaccggtggtggcggatcaggtgggggaggctctggtggaggcggtagtgctgctcctcctaaagctgtgttgaagttggaacccccctggattaatgttctgcaggaggattctgtgaccctgacttgtcagggcgcccgatctcctgagtccgattctattcagtggtttcacaacgggaatttgatccccactcatacccagccttcctaccgttttaaggccaacaacaatgactctggcgagtacacctgtcagaccggccagacatccctctccgaccctgttcacctgaccgtcctctccgaatggctcgtgctccagacccctcacctggaatttcaggaaggcgagacaattatgctgcgctgtcactcctggaaggacaagcccctcgtgaaggtgaccttcttccagaatggcaagtctcagaagttttcccacctcgaccccaccttctccatccctcaggctaaccactcccattccggcgactaccactgcaccggaaacatcggctacaccctgttctcctccaagcccgtcaccatcaccgtccaggtcccttctatgggctcctcctcccctatgggcatcggaggacatcatcatcatcaccattgattctaga

SEQ ID NO: 1153 - DNA, 1335 bp, synthetic construct
  source 1..1335: mol_type = other DNA
gcggccgcaaactacaagacagacttgcaaaagaaggcatgcacagctcagcactgctctgttgcctggtcctcctgactggggtgagggcccagatcatcctcacccagtcccccgcaatcatgtccgcttccccaggagagaaagtgaccatgacctgctccgcctcctcctctgtgtcctacatgcactggtaccagcagaaatccggcacctcccccaaacgctggatctacgacacctccaaactcgcctcaggcgtgcctgcaaggttctctggttccggaagcggcacctcctactccttgactatctcctccatggaggctgaggacgccgcaacatactactgccagcagtggtcctccaaccccctgacttttggagccggcactaaactcgagctgaagcgtacggtggctgcaccatctgtcttcatcttcccgccatctgatgagcagttgaaatctggaactgcctctgttgtgtgcctgctgaataacttctatcccagagaggccaaagtacagtggaaggtggataacgccctccaatcgggtaactcccaggagagtgtcacagagcaggacagcaaggacagcacctacagcctctgtagcaccctgacgctgagcaaagcagactacgagaaacacaaagtctacgcctgcgaagtcacccatcagggcctgagttcgcccgtcacaaagagcttcaacaggggagagtctggtggtggcggatcaggtgggggaggctctggtggaggcggtagtgctgctcctcctaaagctgtgttgaagttggaacccccctggattaatgttctgcaggaggattctgtgaccctgacttgtcagggcgcccgatctcctgagtccgattctattcagtggtttcacaacgggaatttgatccccactcatacccagccttcctaccgttttaaggccaacaacaatgactctggcgagtacacctgtcagaccggccagacatccctctccgaccctgttcacctgaccgtcctctccgaatggctcgtgctccagacccctcacctggaatttcaggaaggcgagacaattatgctgcgctgtcactcctggaaggacaagcccctcgtgaaggtgaccttcttccagaatggcaagtctcagaagttttcccacctcgaccccaccttctccatccctcaggctaaccactcccattccggcgactaccactgcaccggaaacatcggctacaccctgttctcctccaagcccgtcaccatcaccgtccaggtcccttctatgggctcctcctcccctatgggcatctgattctaga

SEQ ID NO: 1154 - DNA, 1413 bp, synthetic construct
  source 1..1413: mol_type = other DNA
gcggccgcaaactacaagacagacttgcaaaagaaggcatgcacagctcagcactgctctgttgcctggtcctcctgactggggtgagggccgaagtgcagctggtggagagcggaggaggattggtgcagcctggaggaagcctgaggctgagttgtgccgctagcggatttcccctgtccagctacgccatgatctgggtgaggcaggcccctggaaaaggtttggagtggattggcatgattttgagagctggaaacatttactacgcatcctgggttaagggacggttcaccatctcccgggacaacagcaagaataccgtttacctccagatgaatagcctgagggccgaggacaccgccgtttattactgcgcccgccgacactacaacagggaaggatatcccatcggcatcggcgacctctggggacagggaacactcgttaccgtgagctccgctagcaccaaaggaccctccgtgtttcccctggccccctcttccaagtccacctccggcggaaccgccgctctgggatgtctggtgaaagattattttcccgagcccgtgaccgtgtcttggaacagcggagccctgacctccggcgtgcacacatgtcccgccgtgctgcagtctagtggcctgtattctctgtcctccgtggtgaccgtgccttcctcttccctgggcacccagacctacatctgtaacgtgaaccacaagccttccaacaccaaagtggataaaaaggtggagcccaagagctctgacaagacccacaccggtggtggcggatcaggtgggggaggctctggtggaggcggtagtgctgctcctcctaaagctgtgttgaagttggaacccccctggattaatgttctgcaggaggattctgtgaccctgacttgtcagggcgcccgatctcctgagtccgattctattcagtggtttcacaacgggaatttgatccccactcatacccagccttcctaccgttttaaggccaacaacaatgactctggcgagtacacctgtcagaccggccagacatccctctccgaccctgttcacctgaccgtcctctccgaatggctcgtgctccagacccctcacctggaatttcaggaaggcgagacaattatgctgcgctgtcactcctggaaggacaagcccctcgtgaaggtgaccttcttccagaatggcaagtctcagaagttttcccacctcgaccccaccttctccatccctcaggctaaccactcccattccggcgactaccactgcaccggaaacatcggctacaccctgttctcctccaagcccgtcaccatcaccgtccaggtcccttctatgggctcctcctcccctatgggcatcggaggacatcatcatcatcaccattgattctaga

SEQ ID NO: 1155 - DNA, 1353 bp, synthetic construct
  source 1..1353: mol_type = other DNA
gcggccgcaaactacaagacagacttgcaaaagaaggcatgcacagctcagcactgctctgttgcctggtcctcctgactggggtgagggccgatatccagatgacccagtccccctcctccctgtctgcttctgtgggagaccgcgtgaccattacctgtcagtcctccgagtctgtgtacaacaacaaacgcctctcctggtaccagcagaagcccggaaaagcccccaaactgctgatttacaccgcctccagcctggcctctggcgttccttctaggttctccggctccggaagcggaaccgattttacactgactatctcctccctgcagcccgaggacttcgctacttactactgccagggagagtttacctgttccaacgccgactgcttcaccttcggtcagggcacaaagctgaccgtcctgtctcagcctaaagccgcaccatccgtcactctgttcccgccctcctctgaggagctccaagccaacaaggccacactagtgtgtctggttagtgacttctacccgggagctgtgacagtggcctggaaggcagatggcagccccgtcaaggttggagtggagaccaccaaaccctccaaacagagcaacaacaagtacgcggcctgtagctacctgagcctgacgcccgagcagtggaagtcccacagaagctacagctgcagagtcacgcatgaagggagcaccgtggagaagacagtggcccctgctgaatcctctggtggtggcggatcaggtgggggaggctctggtggaggcggtagtgctgctcctcctaaagctgtgttgaagttggaacccccctggattaatgttctgcaggaggattctgtgaccctgacttgtcagggcgcccgatctcctgagtccgattctattcagtggtttcacaacgggaatttgatccccactcatacccagccttcctaccgttttaaggccaacaacaatgactctggcgagtacacctgtcagaccggccagacatccctctccgaccctgttcacctgaccgtcctctccgaatggctcgtgctccagacccctcacctggaatttcaggaaggcgagacaattatgctgcgctgtcactcctggaaggacaagcccctcgtgaaggtgaccttcttccagaatggcaagtctcagaagttttcccacctcgaccccaccttctccatccctcaggctaaccactcccattccggcgactaccactgcaccggaaacatcggctacaccctgttctcctccaagcccgtcaccatcaccgtccaggtcccttctatgggctcctcctcccctatgggcatctgattctaga

SEQ ID NO: 1156 - DNA, 1404 bp, synthetic construct
  source 1..1404: mol_type = other DNA
gcggccgcaaactacaagacagacttgcaaaagaaggcatgcacagctcagcactgctctgttgcctggtcctcctgactggggtgagggcccaggttcagctcgtccagagcggagcagaggtcaaaaagcccggcgcctccgtgaaggtgtcctgcaaggcctccggctacaagttcacctcctacgtgatgcactgggtgaggcaggcccccggccagggcctggagtggatcggctacatcaacccctacaacgacgtgaccaagtacaacgagaagttcaagggcagggtgaccatcaccgccgacaagtccacctccaccgcctacctgcagatgaactccctgaggtccgaggacaccgccgtgcactactgcgccaggggctcctactacgactacgacggcttcgtgtactggggccagggcaccctggtgaccgtgtcctccgctagcaccaaaggaccctccgtgtttcccctggccccctcttccaagtccacctccggcggaaccgccgctctgggatgtctggtgaaagattattttcccgagcccgtgaccgtgtcttggaacagcggagccctgacctccggcgtgcacacatgtcccgccgtgctgcagtctagtggcctgtattctctgtcctccgtggtgaccgtgccttcctcttccctgggcacccagacctacatctgtaacgtgaaccacaagccttccaacaccaaagtggataaaaaggtggagcccaagagctctgacaagacccacaccggtggtggcggatcaggtgggggaggctctggtggaggcggtagtgctgctcctcctaaagctgtgttgaagttggaacccccctggattaatgttctgcaggaggattctgtgaccctgacttgtcagggcgcccgatctcctgagtccgattctattcagtggtttcacaacgggaatttgatccccactcatacccagccttcctaccgttttaaggccaacaacaatgactctggcgagtacacctgtcagaccggccagacatccctctccgaccctgttcacctgaccgtcctctccgaatggctcgtgctccagacccctcacctggaatttcaggaaggcgagacaattatgctgcgctgtcactcctggaaggacaagcccctcgtgaaggtgaccttcttccagaatggcaagtctcagaagttttcccacctcgaccccaccttctccatccctcaggctaaccactcccattccggcgactaccactgcaccggaaacatcggctacaccctgttctcctccaagcccgtcaccatcaccgtccaggtcccttctatgggctcctcctcccctatgggcatcggaggacatcatcatcatcaccattgattctaga

SEQ ID NO: 1157 - DNA, 1335 bp, synthetic construct
  source 1..1335: mol_type = other DNA
gcggccgcaaactacaagacagacttgcaaaagaaggcatgcacagctcagcactgctctgttgcctggtcctcctgactggggtgagggccgaaatcgtgctgacccagtcccccgctaccttgagtctgtcccctggagagagagccaccctgtcttgtagtgctacatcctccgtgtcctatatgcactggtaccagcagaaacccggcaaggctcccaaaagatggatctacgacacctccaaactggccagcggcgtgccttctcgtttttccggatctggctccggcaccgagttcacactcaccatctcctccctgcagcccgaagatttcgccacatactactgccagcagtggtcctccaacccactgaccttcggtcagggcaccaaactggaaatcaagcgtacggtggctgcaccatctgtcttcatcttcccgccatctgatgagcagttgaaatctggaactgcctctgttgtgtgcctgctgaataacttctatcccagagaggccaaagtacagtggaaggtggataacgccctccaatcgggtaactcccaggagagtgtcacagagcaggacagcaaggacagcacctacagcctctgtagcaccctgacgctgagcaaagcagactacgagaaacacaaagtctacgcctgcgaagtcacccatcagggcctgagttcgcccgtcacaaagagcttcaacaggggagagtctggtggtggcggatcaggtgggggaggctctggtggaggcggtagtgctgctcctcctaaagctgtgttgaagttggaacccccctggattaatgttctgcaggaggattctgtgaccctgacttgtcagggcgcccgatctcctgagtccgattctattcagtggtttcacaacgggaatttgatccccactcatacccagccttcctaccgttttaaggccaacaacaatgactctggcgagtacacctgtcagaccggccagacatccctctccgaccctgttcacctgaccgtcctctccgaatggctcgtgctccagacccctcacctggaatttcaggaaggcgagacaattatgctgcgctgtcactcctggaaggacaagcccctcgtgaaggtgaccttcttccagaatggcaagtctcagaagttttcccacctcgaccccaccttctccatccctcaggctaaccactcccattccggcgactaccactgcaccggaaacatcggctacaccctgttctcctccaagcccgtcaccatcaccgtccaggtcccttctatgggctcctcctcccctatgggcatctgattctaga

SEQ ID NO: 1158 - DNA, 1575 bp, synthetic construct
  source 1..1575: mol_type = other DNA
gcggccgcaaactacaagacagacttgcaaaagaaggcatgcacagctcagcactgctctgttgcctggtcctcctgactggggtgagggccgatatcaagatgacccagagccccagcagcatgtacgcctctgtgggagagagagtgaccattacctgcaaggccagccaagacattaagagctacctgacctggtaccagaagaagccatggaaaagccccagaaccctgatcttctacagcacccggctggccgacggagttccttctaggttcagcggaagcggcagcggacaggatttctccctgactatcagcagcctcgagagcgacgacaccgcaacatactactgcctgcagcacgacgaatcaccctttaccttcggcgggggcaccaagctggagattaagggtggcggtggatctggaggcggaggtagtggtgggggaggttcacaagtccaactccaacaacccggcgccgagctggttaaacccggagcttcagtcaaaatgtcctgcaaagccagcggctacaccttcaccaactactggatcaactgggtcaaacaaagacccggccaaggcctcgaatggatcggagatatctacccaggaggaggcatcaccaactacaacgaaaagttcaagaccaaagccaccctcaccctggacacctctagctcaaccgtgtacatgcagctgagcagcctgaccagcgaggactctgcagtgtactactgcagcagaagctacggcaagtacttcgactactggggccaaggcaccaccctgatcgtgtctagctctggttctggccaggttcagctccagcagtcaggcgcagagctcgctagaccaggagcttcagtcaaaatgtcctgcaaggcctccggctacacattcacaaggtacacaatgcactgggtgaaacagaggcccggccagggattggagtggattggatacatcaaccccagcaggggctataccaactacaaccagaagttcaaggacaaagccaccctgaccaccgacaaaagcagcagcacagcatacatgcagctgagctccctgaccagcgaggacagtgcagtgtactactgcgccagatactacgacgaccactactgcctggattactggggccagggaacaaccctcacagtctcctccggtggtggcggatcaggtgggggaggctctggtggaggcggtagtcagatcgtcctcacccagtccccagcaatcatgtccgcctcccctggtgagaaagtgaccatgacctgctccgcctcctcctcagtctcctacatgaactggtaccagcagaaaagcggcacctcccccaaaagatggatctatgacacctccaaactggccagcggcgtgcctgctcatttcagaggatctggctccggcacctcctactccttgactatctccggcatggaagctgaagacgccgccacatactactgccagcagtggtcctccaaccccttcaccttcggatctggcaccaaactggaaatcaacggaggacatcatcatcatcaccattgattctaga

SEQ ID NO: 1159 - DNA, 1686 bp, synthetic construct
  source 1..1686: mol_type = other DNA
gcggccgcaaactacaagacagacttgcaaaagaaggcatgcacagctcagcactgctctgttgcctggtcctcctgactggggtgagggccgctgctcctcctaaagctgtgttgaagttggaacccccctggattaatgttctgcaggaggattctgtgaccctgacttgtcagggcgcccgatctcctgagtccgattctattcagtggtttcacaacgggaatttgatccccactcatacccagccttcctaccgttttaaggccaacaacaatgactctggcgagtacacctgtcagaccggccagacatccctctccgaccctgttcacctgaccgtcctctccgaatggctcgtgctccagacccctcacctggaatttcaggaaggcgagacaattatgctgcgctgtcactcctggaaggacaagcccctcgtgaaggtgaccttcttccagaatggcaagtctcagaagttttcccacctcgaccccaccttctccatccctcaggctaaccactcccattccggcgactaccactgcaccggaaacatcggctacaccctgttctcctccaagcccgtcaccatcaccgtccaggtcccttctatgggctcctcctcccctatgggcatcggtggtggcggatcaggtgggggaggctctggtggaggcggtagtgctagcacaaagggacctagcgtgtttcctctggctccatcatccaagagcacctctggaggaactgccgctctgggatgtctggtgaaagattatttccctgaacccgtgaccgtgagttggaactcaggcgctctgacctccggagtgcatacatgtcctgccgtgctgcagagtagtggcctgtattccctgtcctccgtcgtcacagtgccctcttcttccctgggaacccagacatacatctgtaacgtgaaccacaaaccctccaacaccaaagtggataagaaggtggagcccaagagctctgataagacccatacctgccctccttgcccagctcctgaagctgctgggggaccgtcagtcttcctcttccccccaaaacccaaggacaccctcatgatctcccggacccccgaggtcacatgcgtggtggtggacgtgagccacgaagaccctgaggtcaagttcaactggtacgtggacggcgtggaggtgcataatgccaagacaaagccgcgggaggagcagtacaacagcacgtaccgtgtggtcagcgtcctcaccgtcctgcaccaggactggctgaatggcaaggagtacaagtgcaaggtctccaacaaagccctcgctgcccccatcgagaaaaccatctccaaagccaaagggcagccccgagaaccacaggtgtacaccctgcccccatcccgggacgagctgaccaagaaccaggtcagcctgagctgcgccgtcaaaggcttctatcccagcgacatcgccgtggagtgggagagcaatgggcagccggagaacaactacaagaccacgcctcccgtgctggactccgacggctccttcttcctcgtgagcaagctcaccgtggacaagagcaggtggcagcaggggaacgtcttctcatgctccgtgatgcatgaggctctgcacaaccactacacgcagaagagcctctccctgtctccgggtaaatgattctaga

SEQ ID NO: 1160 - DNA, 1017 bp, synthetic construct
  source 1..1017: mol_type = other DNA
gcggccgcaaactacaagacagacttgcaaaagaaggcatgcacagctcagcactgctctgttgcctggtcctcctgactggggtgagggccgctgctcctcctaaagctgtgttgaagttggaacccccctggattaatgttctgcaggaggattctgtgaccctgacttgtcagggcgcccgatctcctgagtccgattctattcagtggtttcacaacgggaatttgatccccactcatacccagccttcctaccgttttaaggccaacaacaatgactctggcgagtacacctgtcagaccggccagacatccctctccgaccctgttcacctgaccgtcctctccgaatggctcgtgctccagacccctcacctggaatttcaggaaggcgagacaattatgctgcgctgtcactcctggaaggacaagcccctcgtgaaggtgaccttcttccagaatggcaagtctcagaagttttcccacctcgaccccaccttctccatccctcaggctaaccactcccattccggcgactaccactgcaccggaaacatcggctacaccctgttctcctccaagcccgtcaccatcaccgtccaggtcccttctatgggctcctcctcccctatgggcatcggtggtggcggatcaggtgggggaggctctggtggaggcggtagtcgtacggtggctgcaccatctgtcttcatcttcccgccatctgatgagcagttgaaatctggaactgcctctgttgtgtgcctgctgaataacttctatcccagagaggccaaagtacagtggaaggtggataacgccctccaatcgggtaactcccaggagagtgtcacagagcaggacagcaaggacagcacctacagcctctgtagcaccctgacgctgagcaaagcagactacgagaaacacaaagtctacgcctgcgaagtcacccatcagggcctgagttcgcccgtcacaaagagcttcaacaggggagagtcttgattctaga

SEQ ID NO: 1161 - DNA, 1458 bp, synthetic construct
  source 1..1458: mol_type = other DNA
gcggccgcaaactacaagacagacttgcaaaagaaggcatgcacagctcagcactgctctgttgcctggtcctcctgactggggtgagggccgaagtgcagctggtggagagcggaggaggattggtgcagcctggaggaagcctgaggctgagttgtgccgctagcggatactcctttaccgggtacacaatgaactgggtgaggcaggcccccggaaagggattggaatgggtggcactgattaaccccaccaagggagtctcaacctacaaccagaaattcaaggaccgcttcaccatttccgtggacaaaagcaagaacaccgcctacctgcagatgaactccctgagagccgaagacaccgccgtgtactactgcgctagatccggctactacggggactccgactggtacttcgacgtgtggggacagggaaccctcgtgactgttagtagcgctagcaccaagggcccatcggtcttccccctggcaccctcctccaagagcacctctgggggcacagcggccctgggctgcctggtcaaggactacttccccgaaccggtgacggtgtcgtggaactcaggcgccctgaccagcggcgtgcacaccttcccggctgtcctacagtcctcaggactctactccctcagcagcgtggtgaccgtgccctccagcagcttgggcacccagacctacatctgcaacgtgaatcacaagcccagcaacaccaaggtggacaagaaagttgagcccaaatcttctgacaaaactcacacatgcccaccgtgcccagcacctgaagccgcagggggaccgtcagtcttcctcttccccccaaaacccaaggacaccctcatgatctcccggacccccgaggtcacatgcgtggtggtggacgtgagccacgaagaccctgaggtcaagttcaactggtacgtggacggcgtggaggtgcataatgccaagacaaagccgcgggaggagcagtacaacagcacgtaccgtgtggtcagcgtcctcaccgtcctgcaccaggactggctgaatggcaaggagtacaagtgcaaggtctccaacaaagccctcgctgcccccatcgagaaaaccatctccaaagccaaagggcagccccgagaaccacaggtgtacaccctgcccccatcccgggacgagctgaccaagaaccaggtcagcctgtggtgcctggtcaaaggcttctatcccagcgacatcgccgtggagtgggagagcaatgggcagccggagaacaactacaagaccacgcctcccgtgctggactccgacggctccttcttcctctacagcaagctcaccgtggacaagagcaggtggcagcaggggaacgtcttctcatgctccgtgatgcatgaggctctgcacaaccactacacgcagaagagcctctccctgtctccgggtaaatgattctaga

SEQ ID NO: 1162 - DNA, 744 bp, synthetic construct
  source 1..744: mol_type = other DNA
gcggccgcaaactacaagacagacttgcaaaagaaggcatgcacagctcagcactgctctgttgcctggtcctcctgactggggtgagggccgatatccagatgacccagtccccctcctccctgtctgcttctgtgggagaccgcgtgaccattacctgtagagcctcccaggacatccgcaactacctgaactggtaccagcagaagcccggcaaagccccaaaactgctcatctactacacctcccgcctggaatccggcgtgccttctaggttctccggctcaggaagcggcaccgattacaccctgactatctcctccctccagcccgaagatttcgccacctactactgccagcagggcaacaccctgccctggacattcggtcagggcacaaaggtcgaaatcaagcgtacggtggctgcaccatctgtcttcatcttcccgccatctgatgagcagttgaaatctggaactgcctctgttgtgtgcctgctgaataacttctatcccagagaggccaaagtacagtggaaggtggataacgccctccaatcgggtaactcccaggagagtgtcacagagcaggacagcaaggacagcacctacagcctcagcagcaccctgacgctgagcaaagcagactacgagaaacacaaagtctacgcctgcgaagtcacccatcagggcctgagttcgcccgtcacaaagagcttcaacaggggagagagttgattctaga

SEQ ID NO: 1163 - DNA, 1467 bp, synthetic construct
  source 1..1467: mol_type = other DNA
gcggccgcaaactacaagacagacttgcaaaagaaggcatgcacagctcagcactgctctgttgcctggtcctcctgactggggtgagggccgaagtgcagctggtggagagcggaggaggattggtgcagcctggaggaagcctgaagctgagctgcgctgctagcggatttacctttaacaaatatgccatgaactgggtgaggcaggcccccggaaaaggattggagtgggtggctaggattaggagcaagtacaacaactacgccacctactatgccgacagcgtgaaggaccgattcaccatctccagggacgacagcaaaaacaccgcctacctgcagatgaacaacctgaagaccgaggacaccgccgtgtactactgcgtgaggcacggcaacttcggcaactcctacatctcctactgggcctactggggccagggcaccctggtgaccgtgtcctccgctagcaccaagggcccatcggtcttccccctggcaccctcctccaagagcacctctgggggcacagcggccctgggctgcctggtcaaggactacttccccgaaccggtgacggtgtcgtggaactcaggcgccctgaccagcggcgtgcacaccttcccggctgtcctacagtcctcaggactctactccctcagcagcgtggtgaccgtgccctccagcagcttgggcacccagacctacatctgcaacgtgaatcacaagcccagcaacaccaaggtggacaagaaagttgagcccaaatcttctgacaaaactcacacatgcccaccgtgcccagcacctgaagccgcagggggaccgtcagtcttcctcttccccccaaaacccaaggacaccctcatgatctcccggacccccgaggtcacatgcgtggtggtggacgtgagccacgaagaccctgaggtcaagttcaactggtacgtggacggcgtggaggtgcataatgccaagacaaagccgcgggaggagcagtacaacagcacgtaccgtgtggtcagcgtcctcaccgtcctgcaccaggactggctgaatggcaaggagtacaagtgcaaggtctccaacaaagccctcgctgcccccatcgagaaaaccatctccaaagccaaagggcagccccgagaaccacaggtgtacaccctgcccccatcccgggacgagctgaccaagaaccaggtcagcctgtggtgcctggtcaaaggcttctatcccagcgacatcgccgtggagtgggagagcaatgggcagccggagaacaactacaagaccacgcctcccgtgctggactccgacggctccttcttcctctacagcaagctcaccgtggacaagagcaggtggcagcaggggaacgtcttctcatgctccgtgatgcatgaggctctgcacaaccactacacgcagaagagcctctccctgtctccgggtaaatgattctaga

SEQ ID NO: 1164 - DNA, 747 bp, synthetic construct
  source 1..747: mol_type = other DNA
gcggccgcaaactacaagacagacttgcaaaagaaggcatgcacagctcagcactgctctgttgcctggtcctcctgactggggtgagggcccagaccgtcgtgacccaggaaccctccctgaccgtgagccccggcggaacagtgaccctcacctgcggaagctccaccggagccgtgacctccggaaactaccccaactgggtccagcagaaacccggccaggcccccagaggcctgatcggaggaaccaagtttttggcccccggcacccccgccagattctccggatctttgctgggcgggaaagccgccctgactctgtccggcgtgcagcctgaggatgaggcagagtactactgtgtgctgtggtatagcaacagatgggtgttcggaggcggcaccaagctgaccgtcctgagccagcccaaagccgcccccagcgtgaccctcttccccccttccagtgaggagctgcaggctaacaaggccaccctcgtgtgcctggtgtctgatttctaccccggcgccgtgaccgtggcctggaaggctgacggctcccccgtgaaggtgggcgttgagacaactaagccctccaaacagagtaacaacaaatatgccgcctcctcctacctcagcctcacccccgaacagtggaaatcccacaggagctattcctgcagagtgacccatgaaggatcaaccgtggaaaagacagtggcccccgcagagtcctcctgattctaga

SEQ ID NO: 1165 - DNA, 1392 bp, synthetic construct
  source 1..1392: mol_type = other DNA
gcggccgcaaactacaagacagacttgcaaaagaaggcatgcacagctcagcactgctctgttgcctggtcctcctgactggggtgagggccgctgctcctcctaaagctgtgttgaagttggaacccccctggattaatgttctgcaggaggattctgtgaccctgacttgtcagggcgcccgatctcctgagtccgattctattcagtggtttcacaacgggaatttgatccccactcatacccagccttcctaccgttttaaggccaacaacaatgactctggcgagtacacctgtcagaccggccagacatccctctccgaccctgttcacctgaccgtcctctccgaatggctcgtgctccagacccctcacctggaatttcaggaaggcgagacaattatgctgcgctgtcactcctggaaggacaagcccctcgtgaaggtgaccttcttccagaatggcaagtctcagaagttttcccacctcgaccccaccttctccatccctcaggctaaccactcccattccggcgactaccactgcaccggaaacatcggctacaccctgttctcctccaagcccgtcaccatcaccgtccaggtcccttctatgggctcctcctcccctatgggcatcggtggtggcggatcaggtgggggaggctctggtggaggcggtagtgagcccaagagctctgataagacccatacctgccctccttgcccagctcctgaagctgctgggggaccgtcagtcttcctcttccccccaaaacccaaggacaccctcatgatctcccggacccccgaggtcacatgcgtggtggtggacgtgagccacgaagaccctgaggtcaagttcaactggtacgtggacggcgtggaggtgcataatgccaagacaaagccgcgggaggagcagtacaacagcacgtaccgtgtggtcagcgtcctcaccgtcctgcaccaggactggctgaatggcaaggagtacaagtgcaaggtctccaacaaagccctcgctgcccccatcgagaaaaccatctccaaagccaaagggcagccccgagaaccacaggtgtacaccctgcccccatcccgggacgagctgaccaagaaccaggtcagcctgagctgcgccgtcaaaggcttctatcccagcgacatcgccgtggagtgggagagcaatgggcagccggagaacaactacaagaccacgcctcccgtgctggactccgacggctccttcttcctcgtgagcaagctcaccgtggacaagagcaggtggcagcaggggaacgtcttctcatgctccgtgatgcatgaggctctgcacaaccactacacgcagaagagcctctccctgtctccgggtaaatgattctaga

SEQ ID NO: 1166 - DNA, 1457 bp, synthetic construct
  source 1..1457: mol_type = other DNA
gcggccgcaaactacaagacagacttgcaaaagaaggcatgcacagctcagcactgctctgttgcctggtcctcctgactggggtgagggccgaagtgcagctggtggagagcggaggaggattggtgcagcctggaggaagcctgaagctgagctgcgctgctagcggatttacctttaacaaatatgccatgaactgggtgaggcaggcccccggaaaaggattggagtgggtggctaggattaggagcaagtacaacaactacgccacctactatgccgacagcgtgaaggaccgattcaccatctccagggacgacagcaaaaacaccgcctacctgcagatgaacaacctgaagaccgaggacaccgccgtgtactactgcgtgaggcacggcaacttcggcaactcctacatctcctactgggcctactggggccagggcaccctggtgaccgtgtcctccgctagcaccaagggcccatcggtcttccccctggcaccctcctccaagagcacctctgggggcacagcggccctgggctgcctggtcaaggactacttccccgaaccggtgacggtgtcgtggaactcaggcgccctgaccagcggcgtgcacaccttcccggctgtcctacagtcctcaggactctactccctcagcagcgtggtgaccgtgccctccagcagcttgggcacccagacctacatctgcaacgtgaatcacaagcccagcaacaccaaggtggacaagaaagttgagcccaaatcttctgacaaaactcacacatgcccaccgtgcccagcacctgaagccgcagggggaccgtcagtcttcctcttccccccaaaacccaaggacaccctcatgatctcccggacccccgaggtcacatgcgtggtggtggacgtgagccacgaagaccctgaggtcaagttcaactggtacgtggacggcgtggaggtgcataatgccaagacaaagccgcgggaggagcagtacaacagcacgtaccgtgtggtcagcgtcctcaccgtcctgcaccaggactggctgaatggcaaggagtacaagtgcaaggtctccaacaaagccctcgctgcccccatcgagaaaaccatctccaaagccaaagggcagccccgagaaccacaggtgtacaccctgcccccatcccgggacgagctgaccaagaaccaggtcagcctgtggtgcctggtcaaaggcttctatcccagcgacatcgccgtggagtgggagagcaatgggcagccggagaacaactacaagaccacgcctcccgtgctggactccgacggctccttcttcctctacagcaagctcaccgtggacaagagcaggtggcagcaggggaacgtcttctcatgctccgtgatgcatgaggctctgcacaaccactacacgcagaagagcctctccctgtctccgggtaaa

SEQ ID NO: 1167 - DNA, 1341 bp, synthetic construct; identical to SEQ ID NO: 1139
  source 1..1341: mol_type = other DNA

SEQ ID NO: 1168 - DNA, 1986 bp, synthetic construct
  source 1..1986: mol_type = other DNA
gcggccgcaaactacaagacagacttgcaaaagaaggcatgcacagctcagcactgctctgttgcctggtcctcctgactggggtgagggccgctgctcctcctaaagctgtgttgaagttggaacccccctggattaatgttctgcaggaggattctgtgaccctgacttgtcagggcgcccgatctcctgagtccgattctattcagtggtttcacaacgggaatttgatccccactcatacccagccttcctaccgttttaaggccaacaacaatgactctggcgagtacacctgtcagaccggccagacatccctctccgaccctgttcacctgaccgtcctctccgaatggctcgtgctccagacccctcacctggaatttcaggaaggcgagacaattatgctgcgctgtcactcctggaaggacaagcccctcgtgaaggtgaccttcttccagaatggcaagtctcagaagttttcccacctcgaccccaccttctccatccctcaggctaaccactcccattccggcgactaccactgcaccggaaacatcggctacaccctgttctcctccaagcccgtcaccatcaccgtccaggtcccttctatgggctcctcctcccctatgggcatcggtggcggtggatctggaggcggaggtagtggtgggggaggttcagctgctcctcctaaggccgtgctgaaactggagcctccctggatcaatgtgctgcaggaagatagcgtgacactgacctgccagggagctcggtcccctgagtccgacagcatccagtggttccataatggcaatctgatccctacccatacacagccatcttatcggttcaaagctaacaacaatgactccggagaatacacttgccagaccggccagaccagtctcagcgaccccgtccatttgactgttctctctgagtggctggtgctccagacaccacatctggagtttcaggagggcgaaaccattatgctccggtgtcattcttggaaggacaagcccctcgtgaaagtcactttcttccagaatggtaaatctcagaagtttagccatctggaccctaccttttccatcccccaggcaaatcatagccacagcggggactaccactgcaccggcaatattggctacactttgttttccagcaagcccgtgaccatcacagtgcaggtgccttccatgggaagttcaagtcctatgggtattggtggtggcggatcaggtgggggaggctctggtggaggcggtagtgagcccaagagctctgataagacccatacctgccctccttgcccagctcctgaagctgctgggggaccgtcagtcttcctcttccccccaaaacccaaggacaccctcatgatctcccggacccccgaggtcacatgcgtggtggtggacgtgagccacgaagaccctgaggtcaagttcaactggtacgtggacggcgtggaggtgcataatgccaagacaaagccgcgggaggagcagtacaacagcacgtaccgtgtggtcagcgtcctcaccgtcctgcaccaggactggctgaatggcaaggagtacaagtgcaaggtctccaacaaagccctcgctgcccccatcgagaaaaccatctccaaagccaaagggcagccccgagaaccacaggtgtacaccctgcccccatcccgggacgagctgaccaagaaccaggtcagcctgagctgcgccgtcaaaggcttctatcccagcgacatcgccgtggagtgggagagcaatgggcagccggagaacaactacaagaccacgcctcccgtgctggactccgacggctccttcttcctcgtgagcaagctcaccgtggacaagagcaggtggcagcaggggaacgtcttctcatgctccgtgatgcatgaggctctgcacaaccactacacgcagaagagcctctccctgtctccgggtaaatgattctaga

SEQ ID NO: 1169 - DNA, 1575 bp, synthetic construct
  source 1..1575: mol_type = other DNA
gcggccgcaaactacaagacagacttgcaaaagaaggcatgcacagctcagcactgctctgttgcctggtcctcctgactggggtgagggccgatatccagatgacccagtccccctcctccctgtctgcttctgtgggagaccgcgtgaccattacctgtagagcctcccaggacatccgcaactacctgaactggtaccagcagaagcccggcaaagccccaaaactgctcatctactacacctcccgcctggaatccggcgtgccttctaggttctccggctcaggaagcggcaccgattacaccctgactatctcctccctccagcccgaagatttcgccacctactactgccagcagggcaacaccctgccctggacattcggtcagggcacaaaggtcgaaatcaagggtggtggcggatcaggtgggggaggctctggtggaggcggtagtgaagtgcagctggtggagagcggaggaggattggtgcagcctggaggaagcctgaggctgagttgtgccgctagcggatactcctttaccgggtacacaatgaactgggtgaggcaggcccccggaaagggattggaatgggtggcactgattaaccccaccaagggagtctcaacctacaaccagaaattcaaggaccgcttcaccatttccgtggacaaaagcaagaacaccgcctacctgcagatgaactccctgagagccgaagacaccgccgtgtactactgcgctagatccggctactacggggactccgactggtacttcgacgtgtggggacagggaaccctcgtgactgttagtagcggtggtggcggatcaggtgggggaggctctggtggaggcggtagtgaacctaaatcctccgacaagacccacacctgccccccttgccccgctcctgaagctgctggaggcccttcagtgtttctgtttcctcccaagcccaaggacacactgatgatttccagaacccccgaggtgacatgcgtggtggtggacgtgagccacgaagatcccgaggtgaagtttaattggtacgtggacggcgtggaagtgcacaacgccaagaccaaaccccgcgaggagcagtataatagcacctacagagtggtgagcgtgctgaccgtgctgcatcaggactggctgaacggcaaggaatacaaatgcaaggtgagcaacaaggccctggctgcccctatcgagaagaccatcagcaaagccaagggacagccaagagaaccccaggtgtacaccctgccccccagcagagatgagctgaccaagaaccaggtgagcctgtggtgcctggtgaaaggcttctaccccagcgacatcgccgtggagtgggagagcaacggccagccagagaacaactacaagacaacaccccccgtgctggacagcgacggctctttcttcctgtacagtaaactgaccgtggacaaatcaaggtggcagcagggcaacgtgttcagctgctccgtgatgcacgaggccctgcacaaccactatacccagaagagcctgtccctgagccccggcaagtgattctaga

SEQ ID NO: 1170 - DNA, 1986 bp, synthetic construct; identical to SEQ ID NO: 1168
  source 1..1986: mol_type = other DNA

SEQ ID NO: 1171 - DNA, 1605 bp, synthetic construct
  source 1..1605: mol_type = other DNA
gcggccgcaaactacaagacagacttgcaaaagaaggcatgcacagctcagcactgctctgttgcctggtcctcctgactggggtgagggccgaagtgcagctggtggagagcggaggaggattggtgcagcctggaggaagcctgaagctgagctgcgctgctagcggatttacctttaacaaatatgccatgaactgggtgaggcaggcccccggaaaaggattggagtgggtggctaggattaggagcaagtacaacaactacgccacctactatgccgacagcgtgaaggaccgattcaccatctccagggacgacagcaaaaacaccgcctacctgcagatgaacaacctgaagaccgaggacaccgccgtgtactactgcgtgaggcacggcaacttcggcaactcctacatctcctactgggcctactggggccagggcaccctggtgaccgtgtcctccggtggcggagggtctggtggtggaggatccgggggaggaggttcaggaggcgggggaagtcagaccgtcgtgacccaggaaccctccctgaccgtgagccccggcggaacagtgaccctcacctgcggaagctccaccggagccgtgacctccggaaactaccccaactgggtccagcagaaacccggccaggcccccagaggcctgatcggaggaaccaagtttttggcccccggcacccccgccagattctccggatctttgctgggcgggaaagccgccctgactctgtccggcgtgcagcctgaggatgaggcagagtactactgtgtgctgtggtatagcaacagatgggtgttcggaggcggcaccaagctgaccgtcctgggtggtggcggatcaggtgggggaggctctggtggaggcggtagtgaacctaaatcctccgacaagacccacacctgccccccttgccccgctcctgaagctgctggaggcccttcagtgtttctgtttcctcccaagcccaaggacacactgatgatttccagaacccccgaggtgacatgcgtggtggtggacgtgagccacgaagatcccgaggtgaagtttaattggtacgtggacggcgtggaagtgcacaacgccaagaccaaaccccgcgaggagcagtataatagcacctacagagtggtgagcgtgctgaccgtgctgcatcaggactggctgaacggcaaggaatacaaatgcaaggtgagcaacaaggccctggctgcccctatcgagaagaccatcagcaaagccaagggacagccaagagaaccccaggtgtacaccctgccccccagcagagatgagctgaccaagaaccaggtgagcctgtggtgcctggtgaaaggcttctaccccagcgacatcgccgtggagtgggagagcaacggccagccagagaacaactacaagacaacaccccccgtgctggacagcgacggctctttcttcctgtacagtaaactgaccgtggacaaatcaaggtggcagcagggcaacgtgttcagctgctccgtgatgcacgaggccctgcacaaccactatacccagaagagcctgtccctgagccccggcaagtgattctaga

SEQ ID NO: 1172 - DNA, 2460 bp, synthetic construct
  source 1..2460: mol_type = other DNA
gcggccgcaaactacaagacagacttgcaaaagaaggcatgcacagctcagcactgctctgttgcctggtcctcctgactggggtgagggccgctgctcctcctaaagctgtgttgaagttggaacccccctggattaatgttctgcaggaggattctgtgaccctgacttgtcagggcgcccgatctcctgagtccgattctattcagtggtttcacaacgggaatttgatccccactcatacccagccttcctaccgttttaaggccaacaacaatgactctggcgagtacacctgtcagaccggccagacatccctctccgaccctgttcacctgaccgtcctctccgaatggctcgtgctccagacccctcacctggaatttcaggaaggcgagacaattatgctgcgctgtcactcctggaaggacaagcccctcgtgaaggtgaccttcttccagaatggcaagtctcagaagttttcccacctcgaccccaccttctccatccctcaggctaaccactcccattccggcgactaccactgcaccggaaacatcggctacaccctgttctcctccaagcccgtcaccatcaccgtccaggtcccttctatgggctcctcctcccctatgggcatcggtggcggtggatctggaggcggaggtagtggtgggggaggtgaagtgcagctggtggagagcggaggaggattggtgcagcctggaggaagcctgaagctgagctgcgctgctagcggatttacctttaacaaatatgccatgaactgggtgaggcaggcccccggaaaaggattggagtgggtggctaggattaggagcaagtacaacaactacgccacctactatgccgacagcgtgaaggaccgattcaccatctccagggacgacagcaaaaacaccgcctacctgcagatgaacaacctgaagaccgaggacaccgccgtgtactactgcgtgaggcacggcaacttcggcaactcctacatctcctactgggcctactggggccagggcaccctggtgaccgtgtcctccggtggcggagggtctggtggtggaggatccgggggaggaggttcaggaggcgggggaagtcagaccgtcgtgacccaggaaccctccctgaccgtgagccccggcggaacagtgaccctcacctgcggaagctccaccggagccgtgacctccggaaactaccccaactgggtccagcagaaacccggccaggcccccagaggcctgatcggaggaaccaagtttttggcccccggcacccccgccagattctccggatctttgctgggcgggaaagccgccctgactctgtccggcgtgcagcctgaggatgaggcagagtactactgtgtgctgtggtatagcaacagatgggtgttcggaggcggcaccaagctgaccgtcctgggtggcggtggatctggaggcggaggtagtggtgggggaggtgctgctcctcctaaggccgtgctgaaactggagcctccctggatcaatgtgctgcaggaagatagcgtgacactgacctgccagggagctcggtcccctgagtccgacagcatccagtggttccataatggcaatctgatccctacccatacacagccatcttatcggttcaaagctaacaacaatgactccggagaatacacttgccagaccggccagaccagtctcagcgaccccgtccatttgactgttctctctgagtggctggtgctccagacaccacatctggagtttcaggagggcgaaaccattatgctccggtgtcattcttggaaggacaagcccctcgtgaaagtcactttcttccagaatggtaaatctcagaagtttagccatctggaccctaccttttccatcccccaggcaaatcatagccacagcggggactaccactgcaccggcaatattggctacactttgttttccagcaagcccgtgaccatcacagtgcaggtgccttccatgggaagttcaagtcctatgggtattggtggtggcggatcaggtgggggaggctctggtggaggcggtagtgaagtgcagctggtggagagcggaggaggattggtgcagcctggaaactccctgaggctgtcctgcgctgctagcggatttaccttttcctcctttggaatgtcctgggtgaggcaggcccccggaaaaggattggagtgggtgagctccatttccggcagtggctccgacacactctacgctgattccgtgaagggccggttcaccatctccagggacaacgctaaaacaaccctgtacctgcagatgaactccttgaggcccgaggacaccgctgtgtattactgtaccatcggcggaagcctgtctaggagctctcagggaaccctcgtgaccgtgtcctccggaggacatcatcatcatcaccattgattctaga

SEQ ID NO: 1173 - DNA, 2430 bp, synthetic construct
  source 1..2430: mol_type = other DNA
gcggccgcaaactacaagacagacttgcaaaagaaggcatgcacagctcagcactgctctgttgcctggtcctcctgactggggtgagggccgctgctcctcctaaagctgtgttgaagttggaacccccctggattaatgttctgcaggaggattctgtgaccctgacttgtcagggcgcccgatctcctgagtccgattctattcagtggtttcacaacgggaatttgatccccactcatacccagccttcctaccgttttaaggccaacaacaatgactctggcgagtacacctgtcagaccggccagacatccctctccgaccctgttcacctgaccgtcctctccgaatggctcgtgctccagacccctcacctggaatttcaggaaggcgagacaattatgctgcgctgtcactcctggaaggacaagcccctcgtgaaggtgaccttcttccagaatggcaagtctcagaagttttcccacctcgaccccaccttctccatccctcaggctaaccactcccattccggcgactaccactgcaccggaaacatcggctacaccctgttctcctccaagcccgtcaccatcaccgtccaggtcccttctatgggctcctcctcccctatgggcatcggtggcggtggatctggaggcggaggtagtggtgggggaggtgatatccagatgacccagtccccctcctccctgtctgcttctgtgggagaccgcgtgaccattacctgtagagcctcccaggacatccgcaactacctgaactggtaccagcagaagcccggcaaagccccaaaactgctcatctactacacctcccgcctggaatccggcgtgccttctaggttctccggctcaggaagcggcaccgattacaccctgactatctcctccctccagcccgaagatttcgccacctactactgccagcagggcaacaccctgccctggacattcggtcagggcacaaaggtcgaaatcaagggtggtggcggatcaggtgggggaggctctggtggaggcggtagtgaagtgcagctggtggagagcggaggaggattggtgcagcctggaggaagcctgaggctgagttgtgccgctagcggatactcctttaccgggtacacaatgaactgggtgaggcaggcccccggaaagggattggaatgggtggcactgattaaccccaccaagggagtctcaacctacaaccagaaattcaaggaccgcttcaccatttccgtggacaaaagcaagaacaccgcctacctgcagatgaactccctgagagccgaagacaccgccgtgtactactgcgctagatccggctactacggggactccgactggtacttcgacgtgtggggacagggaaccctcgtgactgttagtagcggtggcggtggatctggaggcggaggtagtggtgggggaggtgctgctcctcctaaggccgtgctgaaactggagcctccctggatcaatgtgctgcaggaagatagcgtgacactgacctgccagggagctcggtcccctgagtccgacagcatccagtggttccataatggcaatctgatccctacccatacacagccatcttatcggttcaaagctaacaacaatgactccggagaatacacttgccagaccggccagaccagtctcagcgaccccgtccatttgactgttctctctgagtggctggtgctccagacaccacatctggagtttcaggagggcgaaaccattatgctccggtgtcattcttggaaggacaagcccctcgtgaaagtcactttcttccagaatggtaaatctcagaagtttagccatctggaccctaccttttccatcccccaggcaaatcatagccacagcggggactaccactgcaccggcaatattggctacactttgttttccagcaagcccgtgaccatcacagtgcaggtgccttccatgggaagttcaagtcctatgggtattggtggtggcggatcaggtgggggaggctctggtggaggcggtagtgaagtgcagctggtggagagcggaggaggattggtgcagcctggaaactccctgaggctgtcctgcgctgctagcggatttaccttttcctcctttggaatgtcctgggtgaggcaggcccccggaaaaggattggagtgggtgagctccatttccggcagtggctccgacacactctacgctgattccgtgaagggccggttcaccatctccagggacaacgctaaaacaaccctgtacctgcagatgaactccttgaggcccgaggacaccgctgtgtattactgtaccatcggcggaagcctgtctaggagctctcagggaaccctcgtgaccgtgtcctccggaggacatcatcatcatcaccattgattctaga

SEQ ID NO: 1174 - DNA, 1581 bp, synthetic construct
  source 1..1581: mol_type = other DNA
gcggccgcaaactacaagacagacttgcaaaagaaggcatgcacagctcagcactgctctgttgcctggtcctcctgactggggtgagggcccaggtgcagctcgtgcagagcggcgctgaagtcaagaagcctggagcctccgtcaaagtgtcctgcaaggcttctggctatacctttaccaactactggattaattgggtgaggcaggcccctggccagggtctggagtggatgggggatatctacccagggggggggatcaccaattatgcccagaagtttcagggccgagtgacaatgaccagagacactagtattagtaccgcatacatggagctgagcagcctgcgatccgaggacacagccgtgtactactgcgccagaagttacggtaagtactttgattattggggccagggcactttggtgactgtctcatccgcttctaccaaaggaccctccgtttttcccctggccccccaggttcagctcgtccagagcggagcagaggtcaaaaagcccggcgcctccgtgaaggtgtcctgcaaggcctccggctacaccttcaccaactactggatcaactgggtgaggcaggcccccggccagggcctggagtggatgggcgacatctaccccggcggcggcatcaccaactacgcccagaagttccagggcagggtgaccatgaccagggacacctccatctccaccgcctacatggagctgtcctccctgaggtccgaggacaccgccgtgtactactgcgccaggtcctacggcaagtacttcgactactggggccagggcaccctggtgaccgtgtcctccgctagcaccaaaggaccctccgtgtttcccctggccccctcttccaagtccacctccggcggaaccgccgctctgggatgtctggtgaaagattattttcccgagcccgtgaccgtgtcttggaacagcggagccctgacctccggcgtgcacacatgtcccgccgtgctgcagtctagtggcctgtattctctgtcctccgtggtgaccgtgccttcctcttccctgggcacccagacctacatctgtaacgtgaaccacaagccttccaacaccaaagtggataaaaaggtggagcccaagagctctgacaagacccacaccggtggtggcggatcaggtgggggaggctctggtggaggcggtagtgaagtgcagctggtggagagcggaggaggattggtgcagcctggaaactccctgaggctgtcctgcgctgctagcggatttaccttttcctcctttggaatgtcctgggtgaggcaggcccccggaaaaggattggagtgggtgagctccatttccggcagtggctccgacacactctacgctgattccgtgaagggccggttcaccatctccagggacaacgctaaaacaaccctgtacctgcagatgaactccttgaggcccgaggacaccgctgtgtattactgtaccatcggcggaagcctgtctaggagctctcagggaaccctcgtgaccgtgtcctccggaggacatcatcatcatcaccattgattctaga

SEQ ID NO: 1175 - DNA, 1881 bp, synthetic construct
  source 1..1881: mol_type = other DNA
gcggccgcaaactacaagacagacttgcaaaagaaggcatgcacagctcagcactgctctgttgcctggtcctcctgactggggtgagggccgatatccagatgacccagtcccctagcagcctgagcgccagcgtgggcgatagggtgaccatcacctgtaaagcctcccaggacatcaagagctacctgacatggtaccagcagaagcctggaaaggctccaaagctcctgatttattattcaacaaggctggccgacggtgttccttctcgtttctccggctcagggtctggaaccgacttcaccctgactatctcaagtctgcagcccgaagattttgctacctactattgtctgcagcacgacgagagtccattcaccttcggcggtggcaccaaagtcgaaattaagagaaccgtggcagcaccatccgtgttcatcttcccccccgatatccagatgacccagtccccctcctccctgtctgcttctgtgggagaccgcgtgaccattacctgtaaagctagccaggacatcaagtcctacctgacctggtaccagcagaagcccggcaaggctccaaaactgctcatctactactccacccggctggctgacggcgttccttctaggttctccggcagcggaagcggaaccgatttcaccctcaccatctcctccctgcagcccgaagacttcgccacatactactgcctgcagcacgacgaaagtcccttcacctttggcggcggtaccaaagtggagatcaaacgtacggtggctgcaccatctgtcttcatcttcccgccatctgatgagcagttgaaatctggaactgcctctgttgtgtgcctgctgaataacttctatcccagagaggccaaagtacagtggaaggtggataacgccctccaatcgggtaactcccaggagagtgtcacagagcaggacagcaaggacagcacctacagcctctgtagcaccctgacgctgagcaaagcagactacgagaaacacaaagtctacgcctgcgaagtcacccatcagggcctgagttcgcccgtcacaaagagcttcaacaggggagagtctggtggcggtggatctggaggcggaggtagtggtgggggaggttcagatatccagatgacccagtccccctcctccctgtctgcttctgtgggagaccgcgtgaccattacctgtagagcctcccaggacatccgcaactacctgaactggtaccagcagaagcccggcaaagccccaaaactgctcatctactacacctcccgcctggaatccggcgtgccttctaggttctccggctcaggaagcggcaccgattacaccctgactatctcctccctccagcccgaagatttcgccacctactactgccagcagggcaacaccctgccctggacattcggtcagggcacaaaggtcgaaatcaagggtggtggcggatcaggtgggggaggctctggtggaggcggtagtgaagtgcagctggtggagagcggaggaggattggtgcagcctggaggaagcctgaggctgagttgtgccgctagcggatactcctttaccgggtacacaatgaactgggtgaggcaggcccccggaaagggattggaatgggtggcactgattaaccccaccaagggagtctcaacctacaaccagaaattcaaggaccgcttcaccatttccgtggacaaaagcaagaacaccgcctacctgcagatgaactccctgagagccgaagacaccgccgtgtactactgcgctagatccggctactacggggactccgactggtacttcgacgtgtggggacagggaaccctcgtgactgttagtagctgattctaga

SEQ ID NO: 1176 - DNA, 1596 bp, synthetic construct
  source 1..1596: mol_type = other DNA
gcggccgcaaactacaagacagacttgcaaaagaaggcatgcacagctcagcactgctctgttgcctggtcctcctgactggggtgagggcccaggtgcagctcgtgcagagcggcgctgaagtcaagaagcctggagcctccgtcaaagtgtcctgcaaggcttctggctatacctttaccaactactggattaattgggtgaggcaggcccctggccagggtctggagtggatgggggatatctacccagggggggggatcaccaattatgcccagaagtttcagggccgagtgacaatgaccagagacactagtattagtaccgcatacatggagctgagcagcctgcgatccgaggacacagccgtgtactactgcgccagaagttacggtaagtactttgattattggggccagggcactttggtgactgtctcatccgcttctaccaaaggaccctccgtttttcccctggccccccaggttcagctcgtccagagcggagcagaggtcaaaaagcccggcgcctccgtgaaggtgtcctgcaaggcctccggctacaccttcaccaactactggatcaactgggtgaggcaggcccccggccagggcctggagtggatgggcgacatctaccccggcggcggcatcaccaactacgcccagaagttccagggcagggtgaccatgaccagggacacctccatctccaccgcctacatggagctgtcctccctgaggtccgaggacaccgccgtgtactactgcgccaggtcctacggcaagtacttcgactactggggccagggcaccctggtgaccgtgtcctccgctagcaccaaaggaccctccgtgtttcccctggccccctcttccaagtccacctccggcggaaccgccgctctgggatgtctggtgaaagattattttcccgagcccgtgaccgtgtcttggaacagcggagccctgacctccggcgtgcacacatgtcccgccgtgctgcagtctagtggcctgtattctctgtcctccgtggtgaccgtgccttcctcttccctgggcacccagacctacatctgtaacgtgaaccacaagccttccaacaccaaagtggataaaaaggtggagcccaagagctctgacaagacccacaccggtggcggagggtctggtggtggaggatccgggggaggaggttcaggaggcgggggaagtgaagtgcagctggtggagagcggaggaggattggtgcagcctggaaactccctgaggctgtcctgcgctgctagcggatttaccttttcctcctttggaatgtcctgggtgaggcaggcccccggaaaaggattggagtgggtgagctccatttccggcagtggctccgacacactctacgctgattccgtgaagggccggttcaccatctccagggacaacgctaaaacaaccctgtacctgcagatgaactccttgaggcccgaggacaccgctgtgtattactgtaccatcggcggaagcctgtctaggagctctcagggaaccctcgtgaccgtgtcctccggaggacatcatcatcatcaccattgattctaga

SEQ ID NO: 1177 - DNA, 1911 bp, synthetic construct
  source 1..1911: mol_type = other DNA
gcggccgcaaactacaagacagacttgcaaaagaaggcatgcacagctcagcactgctctgttgcctggtcctcctgactggggtgagggccgatatccagatgacccagtcccctagcagcctgagcgccagcgtgggcgatagggtgaccatcacctgtaaagcctcccaggacatcaagagctacctgacatggtaccagcagaagcctggaaaggctccaaagctcctgatttattattcaacaaggctggccgacggtgttccttctcgtttctccggctcagggtctggaaccgacttcaccctgactatctcaagtctgcagcccgaagattttgctacctactattgtctgcagcacgacgagagtccattcaccttcggcggtggcaccaaagtcgaaattaagagaaccgtggcagcaccatccgtgttcatcttcccccccgatatccagatgacccagtccccctcctccctgtctgcttctgtgggagaccgcgtgaccattacctgtaaagctagccaggacatcaagtcctacctgacctggtaccagcagaagcccggcaaggctccaaaactgctcatctactactccacccggctggctgacggcgttccttctaggttctccggcagcggaagcggaaccgatttcaccctcaccatctcctccctgcagcccgaagacttcgccacatactactgcctgcagcacgacgaaagtcccttcacctttggcggcggtaccaaagtggagatcaaacgtacggtggctgcaccatctgtcttcatcttcccgccatctgatgagcagttgaaatctggaactgcctctgttgtgtgcctgctgaataacttctatcccagagaggccaaagtacagtggaaggtggataacgccctccaatcgggtaactcccaggagagtgtcacagagcaggacagcaaggacagcacctacagcctctgtagcaccctgacgctgagcaaagcagactacgagaaacacaaagtctacgcctgcgaagtcacccatcagggcctgagttcgcccgtcacaaagagcttcaacaggggagagtctggtggcggtggatctggaggcggaggtagtggtgggggaggttcagaagtgcagctggtggagagcggaggaggattggtgcagcctggaggaagcctgaagctgagctgcgctgctagcggatttacctttaacaaatatgccatgaactgggtgaggcaggcccccggaaaaggattggagtgggtggctaggattaggagcaagtacaacaactacgccacctactatgccgacagcgtgaaggaccgattcaccatctccagggacgacagcaaaaacaccgcctacctgcagatgaacaacctgaagaccgaggacaccgccgtgtactactgcgtgaggcacggcaacttcggcaactcctacatctcctactgggcctactggggccagggcaccctggtgaccgtgtcctccggtggcggagggtctggtggtggaggatccgggggaggaggttcaggaggcgggggaagtcagaccgtcgtgacccaggaaccctccctgaccgtgagccccggcggaacagtgaccctcacctgcggaagctccaccggagccgtgacctccggaaactaccccaactgggtccagcagaaacccggccaggcccccagaggcctgatcggaggaaccaagtttttggcccccggcacccccgccagattctccggatctttgctgggcgggaaagccgccctgactctgtccggcgtgcagcctgaggatgaggcagagtactactgtgtgctgtggtatagcaacagatgggtgttcggaggcggcaccaagctgaccgtcctgtgattctaga

SEQ ID NO: 1178 - DNA, 1833 bp, synthetic construct
  source 1..1833: mol_type = other DNA
gcggccgcaaactacaagacagacttgcaaaagaaggcatgcacagctcagcactgctctgttgcctggtcctcctgactggggtgagggcccaggtgcagctcgtgcagagcggcgctgaagtcaagaagcctggagcctccgtcaaagtgtcctgcaaggcttctggctatacctttaccaactactggattaattgggtgaggcaggcccctggccagggtctggagtggatgggggatatctacccagggggggggatcaccaattatgcccagaagtttcagggccgagtgacaatgaccagagacactagtattagtaccgcatacatggagctgagcagcctgcgatccgaggacacagccgtgtactactgcgccagaagttacggtaagtactttgattattggggccagggcactttggtgactgtctcatccgcttctaccaaaggaccctccgtttttcccctggccccccaggttcagctcgtccagagcggagcagaggtcaaaaagcccggcgcctccgtgaaggtgtcctgcaaggcctccggctacaccttcaccaactactggatcaactgggtgaggcaggcccccggccagggcctggagtggatgggcgacatctaccccggcggcggcatcaccaactacgcccagaagttccagggcagggtgaccatgaccagggacacctccatctccaccgcctacatggagctgtcctccctgaggtccgaggacaccgccgtgtactactgcgccaggtcctacggcaagtacttcgactactggggccagggcaccctggtgaccgtgtcctccgctagcaccaagggcccatcggtcttccccctggcaccctcctccaagagcacctctgggggcacagcggccctgggctgcctggtcaaggactacttccccgaaccggtgacggtgtcgtggaactcaggcgccctgaccagcggcgtgcacacctgtccggctgtcctacagtcctcaggactctactccctcagcagcgtggtgaccgtgccctccagcagcttgggcacccagacctacatctgcaacgtgaatcacaagcccagcaacaccaaggtggacaagaaagttgagcccaaatcttctgacaaaactcacacatgcccaccgtgcccagcacctgaagccgcagggggaccgtcagtcttcctcttccccccaaaacccaaggacaccctcatgatctcccggacccccgaggtcacatgcgtggtggtggacgtgagccacgaagaccctgaggtcaagttcaagtggtacgtggacggcgtggaggtgcataatgccaagacaaagccgcgggaggagcagtacaacagcacgtaccgtgtggtcagcgtcctcaccgtcgttcaccaggactggctgaatggcaaggagtacaagtgcaaggtctccaacaaagccctcgctgcccccatcgagaaaaccatctccaaagccaaagggcagccccgagaaccacaggtgtacaccctgcccccatcccgggacgagctgaccaagaaccaggtcagcctgtggtgcctggtcaaaggcttctatcccagcgacatcgccgtggagtgggagagcaatgggcagccggagaacaactacaagaccacgcctcccgtgctggactccgacggctccttcttcctctacagcaagctcaccgtggacaagagcaggtggcagcaggggaacgtcttctcatgctccgtgatgcatgaggctctgcacaaccactacacgcagaagagcctctccctgtctccgggtaaatgattctaga

SEQ ID NO: 1179 - DNA, 1104 bp, synthetic construct
  source 1..1104: mol_type = other DNA
gcggccgcaaactacaagacagacttgcaaaagaaggcatgcacagctcagcactgctctgttgcctggtcctcctgactggggtgagggccgatatccagatgacccagtcccctagcagcctgagcgccagcgtgggcgatagggtgaccatcacctgtaaagcctcccaggacatcaagagctacctgacatggtaccagcagaagcctggaaaggctccaaagctcctgatttattattcaacaaggctggccgacggtgttccttctcgtttctccggctcagggtctggaaccgacttcaccctgactatctcaagtctgcagcccgaagattttgctacctactattgtctgcagcacgacgagagtccattcaccttcggcggtggcaccaaagtcgaaattaagagaaccgtggcagcaccatccgtgttcatcttcccccccgatatccagatgacccagtccccctcctccctgtctgcttctgtgggagaccgcgtgaccattacctgtaaagctagccaggacatcaagtcctacctgacctggtaccagcagaagcccggcaaggctccaaaactgctcatctactactccacccggctggctgacggcgttccttctaggttctccggcagcggaagcggaaccgatttcaccctcaccatctcctccctgcagcccgaagacttcgccacatactactgcctgcagcacgacgaaagtcccttcacctttggcggcggtaccaaagtggagatcaaacgtacggtggctgcaccatctgtcttcatcttcccgccatctgatgagcagttgaaatctggaactgcctctgttgtgtgcctgctgaataacttctatcccagagaggccaaagtacagtggaaggtggataacgccctccaatcgggtaactcccaggagagtgtcacagagcaggacagcaaggacagcacctacagcctctgtagcaccctgacgctgagcaaagcagactacgagaaacacaaagtctacgcctgcgaagtcacccatcagggcctgagttcgcccgtcacaaagagcttcaacaggggagagtcttgattctaga

SEQ ID NO: 1180 - DNA, 1467 bp, synthetic construct
  source 1..1467: mol_type = other DNA
gcggccgcaaactacaagacagacttgcaaaagaaggcatgcacagctcagcactgctctgttgcctggtcctcctgactggggtgagggccgaagtgcagctggtggagagcggaggaggattggtgcagcctggaggaagcctgaagctgagctgcgctgctagcggatttacctttaacaaatatgccatgaactgggtgaggcaggcccccggaaaaggattggagtgggtggctaggattaggagcaagtacaacaactacgccacctactatgccgacagcgtgaaggaccgattcaccatctccagggacgacagcaaaaacaccgcctacctgcagatgaacaacctgaagaccgaggacaccgccgtgtactactgcgtgaggcacggcaacttcggcaactcctacatctcctactgggcctactggggccagggcaccctggtgaccgtgtcctccgctagcacaaagggacctagcgtgtttcctctggctccatcatccaagagcacctctggaggaactgccgctctgggatgtctggtgaaagattatttccctgaacccgtgaccgtgagttggaactcaggcgctctgacctccggagtgcatacattccctgccgtgctgcagagtagtggcctgtattccctgtcctccgtcgtcacagtgccctcttcttccctgggaacccagacatacatctgtaacgtgaaccacaaaccctccaacaccaaagtggataagaaggtggagcccaagagctctgataagacccatacctgccctccttgcccagctcctgaagctgctgggggaccgtcagtcttcctcttccccccaaaacccaaggacaccctcatgatctcccggacccccgaggtcacatgcgtggtggtggacgtgagccacgaagaccctgaggtcaagttcaagtggtacgtggacggcgtggaggtgcataatgccaagacaaagccgcgggaggagcagtacaacagcacgtaccgtgtggtcagcgtcctcaccgtcgttcaccaggactggctgaatggcaaggagtacaagtgcaaggtctccaacaaagccctcgctgcccccatcgagaaaaccatctccaaagccaaagggcagccccgagaaccacaggtgtacaccctgcccccatcccgggacgagctgaccaagaaccaggtcagcctgagctgcgccgtcaaaggcttctatcccagcgacatcgccgtggagtgggagagcaatgggcagccggagaacaactacaagaccacgcctcccgtgctggactccgacggctccttcttcctcgtgagcaagctcaccgtggacaagagcaggtggcagcaggggaacgtcttctcatgctccgtgatgcatgaggctctgcacaaccactacacgcagaagagcctctccctgtctccgggtaaatgattctaga

SEQ ID NO: 1181 - DNA, 1587 bp, synthetic construct
  source 1..1587: mol_type = other DNA
gcggccgcaaactacaagacagacttgcaaaagaaggcatgcacagctcagcactgctctgttgcctggtcctcctgactggggtgagggccgaagtgcagctggtggagagcggaggaggattggtgcagcctggaggaagcctgaagctgagctgcgctgctagcggatttacctttaacaaatatgccatgaactgggtgaggcaggcccccggaaaaggattggagtgggtggctaggattaggagcaagtacaacaactacgccacctactatgccgacagcgtgaaggaccgattcaccatctccagggacgacagcaaaaacaccgcctacctgcagatgaacaacctgaagaccgaggacaccgccgtgtactactgcgtgaggcacggcaacttcggcaactcctacatctcctactgggcctactggggccagggcaccctggtgaccgtgtcctccgctagcaccaagggcccatcggtcttccccctggcaccctcctccaagagcacctctgggggcacagcggccctgggctgcctggtcaaggactacttccccgaaccggtgacggtgtcgtggaactcaggcgccctgaccagcggcgtgcacaccttcccggctgtcctacagtcctcaggactctactccctcagcagcgtggtgaccgtgccctccagcagcttgggcacccagacctacatctgcaacgtgaatcacaagcccagcaacaccaaggtggacaagaaagttgagcccaaatcttctgacaagacccacaccggtggtggcggatcaggtgggggaggctctggtggaggcggtagtgatatccagatgacccagtccccctcctccctgtctgcttctgtgggagaccgcgtgaccattacctgtaaagctagccaggacatcaagtcctacctgacctggtaccagcagaagcccggcaaggctccaaaactgctcatctactactccacccggctggctgacggcgttccttctaggttctccggcagcggaagcggaaccgatttcaccctcaccatctcctccctgcagcccgaagacttcgccacatactactgcctgcagcacgacgaaagtcccttcacctttggcggcggtaccaaagtggagatcaaaggtggtggcggatcaggtgggggaggctctggtggaggcggtagtcaggttcagctcgtccagagcggagcagaggtcaaaaagcccggcgcctccgtgaaggtgtcctgcaaggcctccggctacaccttcaccaactactggatcaactgggtgaggcaggcccccggccagggcctggagtggatgggcgacatctaccccggcggcggcatcaccaactacgcccagaagttccagggcagggtgaccatgaccagggacacctccatctccaccgcctacatggagctgtcctccctgaggtccgaggacaccgccgtgtactactgcgccaggtcctacggcaagtacttcgactactggggccagggcaccctggtgaccgtgtcctccggaggacatcatcatcatcaccattgattctaga

SEQ ID NO: 1182 - DNA, 1509 bp, synthetic construct
  source 1..1509: mol_type = other DNA
gcggccgcaaactacaagacagacttgcaaaagaaggcatgcacagctcagcactgctctgttgcctggtcctcctgactggggtgagggcccagaccgtcgtgacccaggaaccctccctgaccgtgagccccggcggaacagtgaccctcacctgcggaagctccaccggagccgtgacctccggaaactaccccaactgggtccagcagaaacccggccaggcccccagaggcctgatcggaggaaccaagtttttggcccccggcacccccgccagattctccggatctttgctgggcgggaaagccgccctgactctgtccggcgtgcagcctgaggatgaggcagagtactactgtgtgctgtggtatagcaacagatgggtgttcggaggcggcaccaagctgaccgtcctgagccagcccaaagccgcccccagcgtgaccctcttccccccttccagtgaggagctgcaggctaacaaggccaccctcgtgtgcctggtgtctgatttctaccccggcgccgtgaccgtggcctggaaggctgacggctcccccgtgaaggtgggcgttgagacaactaagccctccaaacagagtaacaacaaatatgccgcctcctcctacctcagcctcacccccgaacagtggaaatcccacaggagctattcctgcagagtgacccatgaaggatcaaccgtggaaaagacagtggcccccgcagagtcctccggtggtggcggatcaggtgggggaggctctggtggaggcggtagtgatatccagatgacccagtccccctcctccctgtctgcttctgtgggagaccgcgtgaccattacctgtaaagctagccaggacatcaagtcctacctgacctggtaccagcagaagcccggcaaggctccaaaactgctcatctactactccacccggctggctgacggcgttccttctaggttctccggcagcggaagcggaaccgatttcaccctcaccatctcctccctgcagcccgaagacttcgccacatactactgcctgcagcacgacgaaagtcccttcacctttggcggcggtaccaaagtggagatcaaaggtggcggtggatctggaggcggaggtagtggtgggggaggttcacaggttcagctcgtccagagcggagcagaggtcaaaaagcccggcgcctccgtgaaggtgtcctgcaaggcctccggctacaccttcaccaactactggatcaactgggtgaggcaggcccccggccagggcctggagtggatgggcgacatctaccccggcggcggcatcaccaactacgcccagaagttccagggcagggtgaccatgaccagggacacctccatctccaccgcctacatggagctgtcctccctgaggtccgaggacaccgccgtgtactactgcgccaggtcctacggcaagtacttcgactactggggccagggcaccctggtgaccgtgtcctcctgattctaga

SEQ ID NO: 1183 - DNA, 1599 bp, synthetic construct
  source 1..1599: mol_type = other DNA
gcggccgcaaactacaagacagacttgcaaaagaaggcatgcacagctcagcactgctctgttgcctggtcctcctgactggggtgagggcccaggtgcagctggtgcagtccggagctgaggtgaagaagcccggagcctccgtgaaagtcagctgcaaagcctccggctttaacatcaaagacacctatatttactgggtcaggcaggctcccggccagggtctggagtggatgggccgcattgaccccgctaacggagacacaaactacgcacagaaattccagggtcgcgtgacaatgaccagggatacatccattagcacagcatacatggagttgagcagcctgaggtccgaggacaccgcagtgtactattgcgccagaaagtacgggaataatcgcgcttggtttgctttctggggccaggggactctcgttacagtcagttctgcttctaccaaaggaccctccgtttttcccctggcctcccaggttcagctcgtccagagcggagcagaggtcaaaaagcccggcgcctccgtgaaggtgtcctgcaaggcctccggcttcaacatcaaggacacctacatctactgggtgaggcaggcccccggccagggcctggagtggatgggcaggatcgaccccgccaacggcgacaccaactacgcccagaagttccagggcagggtgaccatgaccagggacacctccatctccaccgcctacatggagctgtcctccctgaggtccgaggacaccgccgtgtactactgcgccaggaagtacggcaacaacagggcctggttcgccttctggggccagggcaccctggtgaccgtgtcctccgctagcaccaagggcccatcggtcttccccctggcatcttcctccaagagcacctctgggggcacagcggccctgggctgcctggtcaaggactacttccccgaaccggtgacggtgtcgtggaactcaggcgccctgaccagcggcgtgcacacctgtccggctgtcctacagtcctcaggactctactccctcagcagcgtggtgaccgtgccctccagcagcttgggcacccagacctacatctgcaacgtgaatcacgaacccagcaacaccaaggtggacaagaaagttgagcccaaatcttctgacaagacccacaccggtggtggcggatcaggtgggggaggctctggtggaggcggtagtgaagtgcagctggtggagagcggaggaggattggtgcagcctggaaactccctgaggctgtcctgcgctgctagcggatttaccttttcctcctttggaatgtcctgggtgaggcaggcccccggaaaaggattggagtgggtgagctccatttccggcagtggctccgacacactctacgctgattccgtgaagggccggttcaccatctccagggacaacgctaaaacaaccctgtacctgcagatgaactccttgaggcccgaggacaccgctgtgtattactgtaccatcggcggaagcctgtctaggagctctcagggaaccctcgtgaccgtgtcctccggaggacatcatcatcatcaccattgattctaga

SEQ ID NO: 1184 - DNA, 1911 bp, synthetic construct
  source 1..1911: mol_type = other DNA
gcggccgcaaactacaagacagacttgcaaaagaaggcatgcacagctcagcactgctctgttgcctggtcctcctgactggggtgagggccgacattgtgatgacacagtcccctgatagcctggctgtgagcctgggagagagggccacaattaattgcaaagccagccagtccgtgagcgatgacgtggcctggtaccagcagaagcctggtcagccccctaaattgttgatttatttcgccagctaccggtacaccggggtgccagaccggtttagcgggtccgggagcgggactgattttaccctgacaatcagctccctgcaggccgaagatgtggccgtctattactgccagcaggactatagctcccccctgacttttgggcagggaacaaaagtggaaatcaagagaaccgtggcagcaccatccgtgttcatcttcccccccgatatcgtgatgacccagtcccccgactccctggctgtttctttgggcgagagagccaccatcaactgcaaggccagccagtccgtgtccgacgatgtggcttggtaccagcagaagcccggccagcctcctaagttgctcatttacttcgctagttacaggtacaccggggttcccgacaggttttccggcagtggatctgggaccgactttaccctgactatctcctccctgcaggctgaggacgtcgctgtttactactgccagcaggactactcctccccactgacctttgggcagggcacaaaggtggaaatcaagcgtacggtggctgcaccatctgtcttcatcttcccgccatctgatgagcagttgaaatctggaactgcctctgttgtgtgcctgctgaataacttctatcccagagaggccaaagtacagtggaaggtggataacgccctccaatcgggtaactcccaggagagtgtcacagagcaggacagcaaggacagcacctacagcctctgtagcaccctgacgctgagcaaagcagactacgagaaacacaaagtctacgcctgcgaagtcacccatcagggcctgagttcgcccgtcacaaagagcttcaacaggggagagtctggtggcggtggatctggaggcggaggtagtggtgggggaggttcagaagtgcagctggtggagagcggaggaggattggtgcagcctggaggaagcctgaagctgagctgcgctgctagcggatttacctttaacaaatatgccatgaactgggtgaggcaggcccccggaaaaggattggagtgggtggctaggattaggagcaagtacaacaactacgccacctactatgccgacagcgtgaaggaccgattcaccatctccagggacgacagcaaaaacaccgcctacctgcagatgaacaacctgaagaccgaggacaccgccgtgtactactgcgtgaggcacggcaacttcggcaactcctacatctcctactgggcctactggggccagggcaccctggtgaccgtgtcctccggtggcggagggtctggtggtggaggatccgggggaggaggttcaggaggcgggggaagtcagaccgtcgtgacccaggaaccctccctgaccgtgagccccggcggaacagtgaccctcacctgcggaagctccaccggagccgtgacctccggaaactaccccaactgggtccagcagaaacccggccaggcccccagaggcctgatcggaggaaccaagtttttggcccccggcacccccgccagattctccggatctttgctgggcgggaaagccgccctgactctgtccggcgtgcagcctgaggatgaggcagagtactactgtgtgctgtggtatagcaacagatgggtgttcggaggcggcaccaagctgaccgtcctgtgattctaga

SEQ ID NO: 1185 - DNA, 1851 bp, synthetic construct
  source 1..1851: mol_type = other DNA
gcggccgcaaactacaagacagacttgcaaaagaaggcatgcacagctcagcactgctctgttgcctggtcctcctgactggggtgagggcccaggtgcagctggtgcagtccggagctgaggtgaagaagcccggagcctccgtgaaagtcagctgcaaagcctccggctttaacatcaaagacacctatatttactgggtcaggcaggctcccggccagggtctggagtggatgggccgcattgaccccgctaacggagacacaaactacgcacagaaattccagggtcgcgtgacaatgaccagggatacatccattagcacagcatacatggagttgagcagcctgaggtccgaggacaccgcagtgtactattgcgccagaaagtacgggaataatcgcgcttggtttgctttctggggccaggggactctcgttacagtcagttctgcttctaccaaaggaccctccgtttttcccctggcctcccaggttcagctcgtccagagcggagcagaggtcaaaaagcccggcgcctccgtgaaggtgtcctgcaaggcctccggcttcaacatcaaggacacctacatctactgggtgaggcaggcccccggccagggcctggagtggatgggcaggatcgaccccgccaacggcgacaccaactacgcccagaagttccagggcagggtgaccatgaccagggacacctccatctccaccgcctacatggagctgtcctccctgaggtccgaggacaccgccgtgtactactgcgccaggaagtacggcaacaacagggcctggttcgccttctggggccagggcaccctggtgaccgtgtcctccgctagcacaaagggacctagcgtgtttcctctggcttcttcatccaagagcacctctggaggaactgccgctctgggatgtctggtgaaagattatttccctgaacccgtgaccgtgagttggaactcaggcgctctgacctccggagtgcatacatgtcctgccgtgctgcagagtagtggcctgtattccctgtcctccgtcgtcacagtgccctcttcttccctgggaacccagacatacatctgtaacgtgaaccacgaaccctccaacaccaaagtggataagaaggtggagcccaagagctctgataagacccatacctgccctccttgcccagctcctgaagctgctgggggaccgtcagtcttcctcttccccccaaaacccaaggacaccctcatgatctcccggacccccgaggtcacatgcgtggtggtggacgtgagccacgaagaccctgaggtcaagttcaactggtacgtggacggcgtggaggtgcataatgccaagacaaagccgcgggaggagcagtacaacagcacgtaccgtgtggtcagcgtcctcaccgtcctgcaccaggactggctgaatggcaaggagtacaagtgcaaggtctccaacaaagccctcgctgcccccatcgagaaaaccatctccaaagccaaagggcagccccgagaaccacaggtgtacaccctgcccccatcccgggacgagctgaccaagaaccaggtcagcctgagctgcgccgtcaaaggcttctatcccagcgacatcgccgtggagtgggagagcaatgggcagccggagaacaactacaagaccacgcctcccgtgctggactccgacggctccttcttcctcgtgagcaagctcaccgtggacaagagcaggtggcagcaggggaacgtcttctcatgctccgtgatgcatgaggctctgcacaaccactacacgcagaagagcctctccctgtctccgggtaaatgattctaga

SEQ ID NO: 1186 - DNA, 1104 bp, synthetic construct
  source 1..1104: mol_type = other DNA
gcggccgcaaactacaagacagacttgcaaaagaaggcatgcacagctcagcactgctctgttgcctggtcctcctgactggggtgagggccgacattgtgatgacacagtcccctgatagcctggctgtgagcctgggagagagggccacaattaattgcaaagccagccagtccgtgagcgatgacgtggcctggtaccagcagaagcctggtcagccccctaaattgttgatttatttcgccagctaccggtacaccggggtgccagaccggtttagcgggtccgggagcgggactgattttaccctgacaatcagctccctgcaggccgaagatgtggccgtctattactgccagcaggactatagctcccccctgacttttgggcagggaacaaaagtggaaatcaagagaaccgtggcagcaccatccgtgttcatcttcccccccgatatcgtgatgacccagtcccccgactccctggctgtttctttgggcgagagagccaccatcaactgcaaggccagccagtccgtgtccgacgatgtggcttggtaccagcagaagcccggccagcctcctaagttgctcatttacttcgctagttacaggtacaccggggttcccgacaggttttccggcagtggatctgggaccgactttaccctgactatctcctccctgcaggctgaggacgtcgctgtttactactgccagcaggactactcctccccactgacctttgggcagggcacaaaggtggaaatcaagcgtacggtggctgcaccatctgtcttcatcttcccgccatctgatgagcagttgaaatctggaactgcctctgttgtgtgcctgctgaataacttctatcccagagaggccaaagtacagtggaaggtggataacgccctccaatcgggtaactcccaggagagtgtcacagagcaggacagcaaggacagcacctacagcctctgtagcaccctgacgctgagcaaagcagactacgagaaacacaaagtctacgcctgcgaagtcacccatcagggcctgagttcgcccgtcacaaagagcttcaacaggggagagtcttgattctaga

SEQ ID NO: 1187 - DNA, 1467 bp, synthetic construct
  source 1..1467: mol_type = other DNA
gcggccgcaaactacaagacagacttgcaaaagaaggcatgcacagctcagcactgctctgttgcctggtcctcctgactggggtgagggccgaagtgcagctggtggagagcggaggaggattggtgcagcctggaggaagcctgaagctgagctgcgctgctagcggatttacctttaacaaatatgccatgaactgggtgaggcaggcccccggaaaaggattggagtgggtggctaggattaggagcaagtacaacaactacgccacctactatgccgacagcgtgaaggaccgattcaccatctccagggacgacagcaaaaacaccgcctacctgcagatgaacaacctgaagaccgaggacaccgccgtgtactactgcgtgaggcacggcaacttcggcaactcctacatctcctactgggcctactggggccagggcaccctggtgaccgtgtcctccgctagcaccaagggcccatcggtcttccccctggcatcttcctccaagagcacctctgggggcacagcggccctgggctgcctggtcaaggactacttccccgaaccggtgacggtgtcgtggaactcaggcgccctgaccagcggcgtgcacaccttcccggctgtcctacagtcctcaggactctactccctcagcagcgtggtgaccgtgccctccagcagcttgggcacccagacctacatctgcaacgtgaatcacgaacccagcaacaccaaggtggacaagaaagttgagcccaaatcttctgacaaaactcacacatgcccaccgtgcccagcacctgaagccgcagggggaccgtcagtcttcctcttccccccaaaacccaaggacaccctcatgatctcccggacccccgaggtcacatgcgtggtggtggacgtgagccacgaagaccctgaggtcaagttcaactggtacgtggacggcgtggaggtgcataatgccaagacaaagccgcgggaggagcagtacaacagcacgtaccgtgtggtcagcgtcctcaccgtcctgcaccaggactggctgaatggcaaggagtacaagtgcaaggtctccaacaaagccctcgctgcccccatcgagaaaaccatctccaaagccaaagggcagccccgagaaccacaggtgtacaccctgcccccatcccgggacgagctgaccaagaaccaggtcagcctgtggtgcctggtcaaaggcttctatcccagcgacatcgccgtggagtgggagagcaatgggcagccggagaacaactacaagaccacgcctcccgtgctggactccgacggctccttcttcctctacagcaagctcaccgtggacaagagcaggtggcagcaggggaacgtcttctcatgctccgtgatgcatgaggctctgcacaaccactacacgcagaagagcctctccctgtctccgggtaaatgattctaga

SEQ ID NO: 1188 - DNA, 1869 bp, synthetic construct
  source 1..1869: mol_type = other DNA
gcggccgcaaactacaagacagacttgcaaaagaaggcatgcacagctcagcactgctctgttgcctggtcctcctgactggggtgagggccgacattgtgatgacacagtcccctgatagcctggctgtgagcctgggagagagggccacaattaattgcaaagccagccagtccgtgagcgatgacgtggcctggtaccagcagaagcctggtcagccccctaaattgttgatttatttcgccagctaccggtacaccggggtgccagaccggtttagcgggtccgggagcgggactgattttaccctgacaatcagctccctgcaggccgaagatgtggccgtctattactgccagcaggactatagctcccccctgacttttgggcagggaacaaaagtggaaatcaagagaaccgtggcagcaccatccgtgttcatcttcccccccgatatcgtgatgacccagtcccccgactccctggctgtttctttgggcgagagagccaccatcaactgcaaggccagccagtccgtgtccgacgatgtggcttggtaccagcagaagcccggccagcctcctaagttgctcatttacttcgctagttacaggtacaccggggttcccgacaggttttccggcagtggatctgggaccgactttaccctgactatctcctccctgcaggctgaggacgtcgctgtttactactgccagcaggactactcctccccactgacctttgggcagggcacaaaggtggaaatcaagcgtacggtggctgcaccatctgtcttcatcttcccgccatctgatgagcagttgaaatctggaactgcctctgttgtgtgcctgctgaataacttctatcccagagaggccaaagtacagtggaaggtggataacgccctccaatcgggtaactcccaggagagtgtcacagagcaggacagcaaggacagcacctacagcctctgtagcaccctgacgctgagcaaagcagactacgagaaacacaaagtctacgcctgcgaagtcacccatcagggcctgagttcgcccgtcacaaagagcttcaacaggggagagtctggtggcggtggatctggaggcggaggtagtggtgggggaggttcacaggttcagctccagcagtcaggcgcagagctcgctagaccaggagcttcagtcaaaatgtcctgcaagacaagcggctacacattcaccaggtacacaatgcactgggtcaaacagaggcccggccagggattggagtggattggatatatcaaccccagcaggggctacaccaactacaaccagaaattcaaggacaaagccaccctgaccaccgacaaatccagctccacagcatacatgcagttgagctccctgaccagcgaggactccgcagtttactactgcgccaggtactacgacgaccactactccctggattactggggccagggcacaaccctgaccgtttcttccggtggtggcggatcaggtgggggaggctctggtggaggcggtagtcagatcgtcctcacccagtccccctcctccctctccgcctccctcggtgaaaaagtcaccatgacctgccgcgcctcctcctccgtctcctacatgaactggtaccagcagaaacccggcacctcccccaaaagatggatctacgacacctccaaagtcgcctccggcgtgcccgaccgcttctctggatctggctccggcacctcctactccctgactatctcctccatggaagctgaagatgctgctacctactactgccagcagtggtcctccaatcccctcaccttcggcgccggcaccaagctggaactgaagtgattctaga

SEQ ID NO: 1189 - DNA, 1227 bp, synthetic construct
  source 1..1227: mol_type = other DNA
gcggccgcaaactacaagacagacttgcaaaagaaggcatgcacagctcagcactgctctgttgcctggtcctcctgactggggtgagggccgaagtgcagctggtgcagagcggagcagaggtgaagaagccaggggagagcctgaagatcagctgcaagggaagcggatacagctttagcagcagctggatcggctgggtgaggcagatgcctggaaaagggctggagtggatgggaattatctacccagatgactccgacaccaggtacagccccagcttccagggacaggtgacaatctcagctgacaaaagcatccggaccgcctatctgcagtggagcagcctgaaagctagcgacaccgccatgtattactgcgccaggcacgtgaccatgatctggggagtgattatcgacttctgggggcagggaaccctggtgacagtgtctagcgccagcaccaaaggcccctctgtgttccctctggctcccgaagtgcagctggtggagagcggaggaggattggtgcagcctggaggaagcctgaagctgagctgcgctgctagcggatttacctttaacaaatatgccatgaactgggtgaggcaggcccccggaaaaggattggagtgggtggctaggattaggagcaagtacaacaactacgccacctactatgccgacagcgtgaaggaccgattcaccatctccagggacgacagcaaaaacaccgcctacctgcagatgaacaacctgaagaccgaggacaccgccgtgtactactgcgtgaggcacggcaacttcggcaactcctacatctcctactgggcctactggggccagggcaccctggtgaccgtgtcctccgctagcaccaagggcccatcggtcttccccctggcaccctcctccaagagcacctctgggggcacagcggccctgggctgcctggtcaaggactacttccccgaaccggtgacggtgtcgtggaactcaggcgccctgaccagcggcgtgcacaccttcccggctgtcctacagtcctcaggactctactccctcagcagcgtggtgaccgtgccctccagcagcttgggcacccagacctacatctgcaacgtgaatcacaagcccagcaacaccaaggtggacaagaaagttgagcccaaatcttctgacaagacccacaccggaggacatcatcatcatcaccattgattctaga

SEQ ID NO: 1190 - DNA, 1107 bp, synthetic construct
  source 1..1107: mol_type = other DNA
gcggccgcaaactacaagacagacttgcaaaagaaggcatgcacagctcagcactgctctgttgcctggtcctcctgactggggtgagggccgctattcagctgacccagtccccctcctccctgtctgcttctgtgggagatagggtgactattacctgtcgggcctcccagggaatctcctctgctctggcttggtaccagcagaagcccggaaaggctcccaagctgctgatctacgacgcctcctctctggagtccggcgtgccttctcgatttagcggttccggcagtggcaccgacttcactctgaccatctcctccctgcagcccgaagatttcgccacctactactgccagcagttcaactcttacccctacaccttcggccagggcaccaagctggagatcaaaagaaccgtggccgccccctcagtgttcatcttccctcctcagaccgtcgtgacccaggaaccctccctgaccgtgagccccggcggaacagtgaccctcacctgcggaagctccaccggagccgtgacctccggaaactaccccaactgggtccagcagaaacccggccaggcccccagaggcctgatcggaggaaccaagtttttggcccccggcacccccgccagattctccggatctttgctgggcgggaaagccgccctgactctgtccggcgtgcagcctgaggatgaggcagagtactactgtgtgctgtggtatagcaacagatgggtgttcggaggcggcaccaagctgaccgtcctgagccagcccaaagccgcccccagcgtgaccctcttccccccttccagtgaggagctgcaggctaacaaggccaccctcgtgtgcctggtgtctgatttctaccccggcgccgtgaccgtggcctggaaggctgacggctcccccgtgaaggtgggcgttgagacaactaagccctccaaacagagtaacaacaaatatgccgcctcctcctacctcagcctcacccccgaacagtggaaatcccacaggagctattcctgcagagtgacccatgaaggatcaaccgtggaaaagacagtggcccccgcagagtcctcctgattctaga

SEQ ID NO: 1191 - DNA, 1227 bp, synthetic construct
  source 1..1227: mol_type = other DNA
gcggccgcaaactacaagacagacttgcaaaagaaggcatgcacagctcagcactgctctgttgcctggtcctcctgactggggtgagggccgaagtgcagctggtggagagcggaggaggagatgtgcagcctggaggaagcctgaggctgagttgtaaggcaagcggatacacattcacaagctacgtgatgcactgggtgaggcaggcccctggaaaaggactggagtgggtgggatacattaatccctacaatgacggcacaaaatacaacgaaagcgtgaaaggcaggttcaccctgagctctgacaaatcttctagcaccgcctacctgcagatgaactccctgagggctgaggacaccgccgtgtattactgcgccaggggaacatactactatggcagtcgggtgttcgactactgggggcagggtactctggtgacagtgagcagtgccagcaccaaaggacccagcgtgttcccactggctcccgaagtgcagctggtggagagcggaggaggattggtgcagcctggaggaagcctgaagctgagctgcgctgctagcggatttacctttaacaaatatgccatgaactgggtgaggcaggcccccggaaaaggattggagtgggtggctaggattaggagcaagtacaacaactacgccacctactatgccgacagcgtgaaggaccgattcaccatctccagggacgacagcaaaaacaccgcctacctgcagatgaacaacctgaagaccgaggacaccgccgtgtactactgcgtgaggcacggcaacttcggcaactcctacatctcctactgggcctactggggccagggcaccctggtgaccgtgtcctccgctagcaccaagggcccatcggtcttccccctggcaccctcctccaagagcacctctgggggcacagcggccctgggctgcctggtcaaggactacttccccgaaccggtgacggtgtcgtggaactcaggcgccctgaccagcggcgtgcacaccttcccggctgtcctacagtcctcaggactctactccctcagcagcgtggtgaccgtgccctccagcagcttgggcacccagacctacatctgcaacgtgaatcacaagcccagcaacaccaaggtggacaagaaagttgagcccaaatcttctgacaagacccacaccggaggacatcatcatcatcaccattgattctaga

SEQ ID NO: 1192 - DNA, 1122 bp, synthetic construct
  source 1..1122: mol_type = other DNA
gcggccgcaaactacaagacagacttgcaaaagaaggcatgcacagctcagcactgctctgttgcctggtcctcctgactggggtgagggccgatatcgtgatgacccagtcccccgccaccctgtctctgtctcctggagaaagggccaccctgtcctgtaggtcctctaaaagtctgctgaacagtaacggcaacacctacctgtactggttccagcagaaacccggccaggcccctagactgctgatctataggatgtccaacctggcctccggcgtgcctgctagattctctggaagcggaagcggcacagacttcaccctgactatctcctccctggagcccgaagattttgctgtgtactactgcatgcagcacctggagtatcccctgaccttcggccagggtaccaaggtggagatcaagaggaccgtggccgccccttctgtgtttatctttcccccccagaccgtcgtgacccaggaaccctccctgaccgtgagccccggcggaacagtgaccctcacctgcggaagctccaccggagccgtgacctccggaaactaccccaactgggtccagcagaaacccggccaggcccccagaggcctgatcggaggaaccaagtttttggcccccggcacccccgccagattctccggatctttgctgggcgggaaagccgccctgactctgtccggcgtgcagcctgaggatgaggcagagtactactgtgtgctgtggtatagcaacagatgggtgttcggaggcggcaccaagctgaccgtcctgagccagcccaaagccgcccccagcgtgaccctcttccccccttccagtgaggagctgcaggctaacaaggccaccctcgtgtgcctggtgtctgatttctaccccggcgccgtgaccgtggcctggaaggctgacggctcccccgtgaaggtgggcgttgagacaactaagccctccaaacagagtaacaacaaatatgccgcctcctcctacctcagcctcacccccgaacagtggaaatcccacaggagctattcctgcagagtgacccatgaaggatcaaccgtggaaaagacagtggcccccgcagagtcctcctgattctaga

SEQ ID NO: 1193 - DNA, 1407 bp, synthetic construct
  source 1..1407: mol_type = other DNA
gcggccgcaaactacaagacagacttgcaaaagaaggcatgcacagctcagcactgctctgttgcctggtcctcctgactggggtgagggcccaggttcagctccaggagtcaggcccaggactcgttaaaccctccgagaccctctccctgacatgcacagtctccggcttctccctcacaggctacggagtcaactggatcagacagccccccggaaaaggcctggagtggattggaatgatttggggcgacggaagcaccaactacaacccctccctgaagagtcgtgtcaccatcagtgtggacacctccaagaaccagttctccctcaaactgagctccgtgaccgccgctgacaccgctgtttattactgcgccagggacggctactccaacttccactactacgtgatggactattggggccagggcaccctggtcacagtctcttctgctagcaccaaaggaccctccgtgtttcccctggccccctcttccaagtccacctccggcggaaccgccgctctgggatgtctggtgaaagattattttcccgagcccgtgaccgtgtcttggaacagcggagccctgacctccggcgtgcacacatgtcccgccgtgctgcagtctagtggcctgtattctctgtcctccgtggtgaccgtgccttcctcttccctgggcacccagacctacatctgtaacgtgaaccacaagccttccaacaccaaagtggataaaaaggtggagcccaagagctctgacaagacccacaccggtggtggcggatcaggtgggggaggctctggtggaggcggtagtgctgctcctcctaaagctgtgttgaagttggaacccccctggattaatgttctgcaggaggattctgtgaccctgacttgtcagggcgcccgatctcctgagtccgattctattcagtggtttcacaacgggaatttgatccccactcatacccagccttcctaccgttttaaggccaacaacaatgactctggcgagtacacctgtcagaccggccagacatccctctccgaccctgttcacctgaccgtcctctccgaatggctcgtgctccagacccctcacctggaatttcaggaaggcgagacaattatgctgcgctgtcactcctggaaggacaagcccctcgtgaaggtgaccttcttccagaatggcaagtctcagaagttttcccacctcgaccccaccttctccatccctcaggctaaccactcccattccggcgactaccactgcaccggaaacatcggctacaccctgttctcctccaagcccgtcaccatcaccgtccaggtcccttctatgggctcctcctcccctatgggcatcggaggacatcatcatcatcaccattgattctaga

SEQ ID NO: 1194 - DNA, 1350 bp, synthetic construct
  source 1..1350: mol_type = other DNA
gcggccgcaaactacaagacagacttgcaaaagaaggcatgcacagctcagcactgctctgttgcctggtcctcctgactggggtgagggccgatatcgtgatgacccagtcccccgactccctggctgtttctttgggcgagagagccaccatcaactgccgcgcttccgagtctgtggagtactacgtgaccagcctgatgcagtggtaccagcagaagcccggccagcctcctaagttgctgatctacgctgctagtaacgttgaaagcggcgttcccgataggttttccgggagtggctccggaaccgacttcacactcaccatctcctccctgcaggctgaggacgtcgctgtttactactgccagcagtcccggaaggtgccatggacattcgggcagggtaccaaggtcgagatcaagcgtacggtggctgcaccatctgtcttcatcttcccgccatctgatgagcagttgaaatctggaactgcctctgttgtgtgcctgctgaataacttctatcccagagaggccaaagtacagtggaaggtggataacgccctccaatcgggtaactcccaggagagtgtcacagagcaggacagcaaggacagcacctacagcctctgtagcaccctgacgctgagcaaagcagactacgagaaacacaaagtctacgcctgcgaagtcacccatcagggcctgagttcgcccgtcacaaagagcttcaacaggggagagtctggtggtggcggatcaggtgggggaggctctggtggaggcggtagtgctgctcctcctaaagctgtgttgaagttggaacccccctggattaatgttctgcaggaggattctgtgaccctgacttgtcagggcgcccgatctcctgagtccgattctattcagtggtttcacaacgggaatttgatccccactcatacccagccttcctaccgttttaaggccaacaacaatgactctggcgagtacacctgtcagaccggccagacatccctctccgaccctgttcacctgaccgtcctctccgaatggctcgtgctccagacccctcacctggaatttcaggaaggcgagacaattatgctgcgctgtcactcctggaaggacaagcccctcgtgaaggtgaccttcttccagaatggcaagtctcagaagttttcccacctcgaccccaccttctccatccctcaggctaaccactcccattccggcgactaccactgcaccggaaacatcggctacaccctgttctcctccaagcccgtcaccatcaccgtccaggtcccttctatgggctcctcctcccctatgggcatctgattctaga

SEQ ID NO: 1195 - DNA, 1404 bp, synthetic construct
  source 1..1404: mol_type = other DNA
gcggccgcaaactacaagacagacttgcaaaagaaggcatgcacagctcagcactgctctgttgcctggtcctcctgactggggtgagggcccaggttcagctccaggagtcaggcccaggactcgttaaaccctccgagaccctctccctgacatgcacagtctccggcttctccctctccgactacggagtccactggatcaggcagccacccggaaaaggcctggagtggatcggagtgatctgggctggcggaggaaccaactacaacccctccctgaagagtcgcgtgaccatctccgtggacacctccaagaaccagttctccctcaaactgagctccgtgactgccgccgacaccgctgtttactactgcgcaagggacaaaggctactcctactactactccatggactactggggccagggcaccttggtgactgtctcttccgctagcaccaaaggaccctccgtgtttcccctggccccctcttccaagtccacctccggcggaaccgccgctctgggatgtctggtgaaagattattttcccgagcccgtgaccgtgtcttggaacagcggagccctgacctccggcgtgcacacatgtcccgccgtgctgcagtctagtggcctgtattctctgtcctccgtggtgaccgtgccttcctcttccctgggcacccagacctacatctgtaacgtgaaccacaagccttccaacaccaaagtggataaaaaggtggagcccaagagctctgacaagacccacaccggtggtggcggatcaggtgggggaggctctggtggaggcggtagtgctgctcctcctaaagctgtgttgaagttggaacccccctggattaatgttctgcaggaggattctgtgaccctgacttgtcagggcgcccgatctcctgagtccgattctattcagtggtttcacaacgggaatttgatccccactcatacccagccttcctaccgttttaaggccaacaacaatgactctggcgagtacacctgtcagaccggccagacatccctctccgaccctgttcacctgaccgtcctctccgaatggctcgtgctccagacccctcacctggaatttcaggaaggcgagacaattatgctgcgctgtcactcctggaaggacaagcccctcgtgaaggtgaccttcttccagaatggcaagtctcagaagttttcccacctcgaccccaccttctccatccctcaggctaaccactcccattccggcgactaccactgcaccggaaacatcggctacaccctgttctcctccaagcccgtcaccatcaccgtccaggtcccttctatgggctcctcctcccctatgggcatcggaggacatcatcatcatcaccattgattctaga

SEQ ID NO: 1196 - DNA, 1350 bp, synthetic construct
  source 1..1350: mol_type = other DNA
gcggccgcaaactacaagacagacttgcaaaagaaggcatgcacagctcagcactgctctgttgcctggtcctcctgactggggtgagggccgatatcgtgatgacccagtcccccgactccctggctgtttctttgggcgagagagccaccatcaactgccgcgcttccgagtctgtggagtactacgtgaccagcctgatgcagtggtaccagcagaagcccggccagcctcctaagttgctgatctacgctgctagtaacgttgaaagcggcgttcccgataggttttccgggagtggctccggaaccgacttcacactcaccatctcctccctgcaggctgaggacgtcgctgtttactactgccagcagtcccggaaggtgccatacacatttggacagggcacaaaggtcgagatcaagcgtacggtggctgcaccatctgtcttcatcttcccgccatctgatgagcagttgaaatctggaactgcctctgttgtgtgcctgctgaataacttctatcccagagaggccaaagtacagtggaaggtggataacgccctccaatcgggtaactcccaggagagtgtcacagagcaggacagcaaggacagcacctacagcctctgtagcaccctgacgctgagcaaagcagactacgagaaacacaaagtctacgcctgcgaagtcacccatcagggcctgagttcgcccgtcacaaagagcttcaacaggggagagtctggtggtggcggatcaggtgggggaggctctggtggaggcggtagtgctgctcctcctaaagctgtgttgaagttggaacccccctggattaatgttctgcaggaggattctgtgaccctgacttgtcagggcgcccgatctcctgagtccgattctattcagtggtttcacaacgggaatttgatccccactcatacccagccttcctaccgttttaaggccaacaacaatgactctggcgagtacacctgtcagaccggccagacatccctctccgaccctgttcacctgaccgtcctctccgaatggctcgtgctccagacccctcacctggaatttcaggaaggcgagacaattatgctgcgctgtcactcctggaaggacaagcccctcgtgaaggtgaccttcttccagaatggcaagtctcagaagttttcccacctcgaccccaccttctccatccctcaggctaaccactcccattccggcgactaccactgcaccggaaacatcggctacaccctgttctcctccaagcccgtcaccatcaccgtccaggtcccttctatgggctcctcctcccctatgggcatctgattctaga

SEQ ID NO: 1197 - DNA, 1389 bp, synthetic construct
  source 1..1389: mol_type = other DNA
gcggccgcaaactacaagacagacttgcaaaagaaggcatgcacagctcagcactgctctgttgcctggtcctcctgactggggtgagggcccaggttcagctcgtccagagcggagcagaggtcaaaaagcccggcgcctccgtgaaggtgtcctgcaaggcctccggctacaccttcacctcctacgtgatccagtgggtgaggcaggcccccggccagggcctggagtggatgggctccatcaacccctacaacgactacaccaactacgcccagaagttccagggcagggtgaccatgaccagggacacctccatctccaccgcctacatggagctgtcctccctgaggtccgaggacaccgccgtgtactactgcgccaggtggggcgacggcaactactggggccagggcaccctggtgaccgtgtcctccgctagcaccaaaggaccctccgtgtttcccctggccccctcttccaagtccacctccggcggaaccgccgctctgggatgtctggtgaaagattattttcccgagcccgtgaccgtgtcttggaacagcggagccctgacctccggcgtgcacacatgtcccgccgtgctgcagtctagtggcctgtattctctgtcctccgtggtgaccgtgccttcctcttccctgggcacccagacctacatctgtaacgtgaaccacaagccttccaacaccaaagtggataaaaaggtggagcccaagagctctgacaagacccacaccggtggtggcggatcaggtgggggaggctctggtggaggcggtagtgctgctcctcctaaagctgtgttgaagttggaacccccctggattaatgttctgcaggaggattctgtgaccctgacttgtcagggcgcccgatctcctgagtccgattctattcagtggtttcacaacgggaatttgatccccactcatacccagccttcctaccgttttaaggccaacaacaatgactctggcgagtacacctgtcagaccggccagacatccctctccgaccctgttcacctgaccgtcctctccgaatggctcgtgctccagacccctcacctggaatttcaggaaggcgagacaattatgctgcgctgtcactcctggaaggacaagcccctcgtgaaggtgaccttcttccagaatggcaagtctcagaagttttcccacctcgaccccaccttctccatccctcaggctaaccactcccattccggcgactaccactgcaccggaaacatcggctacaccctgttctcctccaagcccgtcaccatcaccgtccaggtcccttctatgggctcctcctcccctatgggcatcggaggacatcatcatcatcaccattgattctaga

SEQ ID NO: 1198 - DNA, 1338 bp, synthetic construct
  source 1..1338: mol_type = other DNA
gcggccgcaaactacaagacagacttgcaaaagaaggcatgcacagctcagcactgctctgttgcctggtcctcctgactggggtgagggccgatatccagatgacccagtccccctcctccctgtctgcttctgtgggagaccgcgtgaccattacctgtaccgcctcctcttccgtgtcctcttcctattttcactggtaccagcagaagcccggcaaggcaccaaaactcctcatctactccacctccaacctggcctccggcgttccttctcgtttctccggttccggctctggcaccgatttcaccctcaccatctcatccctgcagcctgaggacttcgccacctactactgccaccagtaccacaggtcccccactttcggcggtggaacaaaggtggagattaagcgtacggtggctgcaccatctgtcttcatcttcccgccatctgatgagcagttgaaatctggaactgcctctgttgtgtgcctgctgaataacttctatcccagagaggccaaagtacagtggaaggtggataacgccctccaatcgggtaactcccaggagagtgtcacagagcaggacagcaaggacagcacctacagcctctgtagcaccctgacgctgagcaaagcagactacgagaaacacaaagtctacgcctgcgaagtcacccatcagggcctgagttcgcccgtcacaaagagcttcaacaggggagagtctggtggtggcggatcaggtgggggaggctctggtggaggcggtagtgctgctcctcctaaagctgtgttgaagttggaacccccctggattaatgttctgcaggaggattctgtgaccctgacttgtcagggcgcccgatctcctgagtccgattctattcagtggtttcacaacgggaatttgatccccactcatacccagccttcctaccgttttaaggccaacaacaatgactctggcgagtacacctgtcagaccggccagacatccctctccgaccctgttcacctgaccgtcctctccgaatggctcgtgctccagacccctcacctggaatttcaggaaggcgagacaattatgctgcgctgtcactcctggaaggacaagcccctcgtgaaggtgaccttcttccagaatggcaagtctcagaagttttcccacctcgaccccaccttctccatccctcaggctaaccactcccattccggcgactaccactgcaccggaaacatcggctacaccctgttctcctccaagcccgtcaccatcaccgtccaggtcccttctatgggctcctcctcccctatgggcatctgattctaga

SEQ ID NO: 1199 - DNA, 1407 bp, synthetic construct
  source 1..1407: mol_type = other DNA
gcggccgcaaactacaagacagacttgcaaaagaaggcatgcacagctcagcactgctctgttgcctggtcctcctgactggggtgagggcccaggttcagctccaggagtcaggcccaggactcgttaaaccctccgagaccctctccctgacatgcacagtcaccggctactccatcacatcagactacgcctggaactggatcagacagcccccaggaaaaggcctcgagtggattggctatatcagatacagcggctccaccaactacaacccctccctcaagtcccgggtgaccatctctgttgatacttccaagaaccagttctccctcaagctgagttccgtgaccgccgcagacaccgctgtttactattgcgccagagactggcccaggcccagttattggtatttcgacgtgtggggccagggcaccctggttacagtttcctccgctagcaccaaaggaccctccgtgtttcccctggccccctcttccaagtccacctccggcggaaccgccgctctgggatgtctggtgaaagattattttcccgagcccgtgaccgtgtcttggaacagcggagccctgacctccggcgtgcacacatgtcccgccgtgctgcagtctagtggcctgtattctctgtcctccgtggtgaccgtgccttcctcttccctgggcacccagacctacatctgtaacgtgaaccacaagccttccaacaccaaagtggataaaaaggtggagcccaagagctctgacaagacccacaccggtggtggcggatcaggtgggggaggctctggtggaggcggtagtgctgctcctcctaaagctgtgttgaagttggaacccccctggattaatgttctgcaggaggattctgtgaccctgacttgtcagggcgcccgatctcctgagtccgattctattcagtggtttcacaacgggaatttgatccccactcatacccagccttcctaccgttttaaggccaacaacaatgactctggcgagtacacctgtcagaccggccagacatccctctccgaccctgttcacctgaccgtcctctccgaatggctcgtgctccagacccctcacctggaatttcaggaaggcgagacaattatgctgcgctgtcactcctggaaggacaagcccctcgtgaaggtgaccttcttccagaatggcaagtctcagaagttttcccacctcgaccccaccttctccatccctcaggctaaccactcccattccggcgactaccactgcaccggaaacatcggctacaccctgttctcctccaagcccgtcaccatcaccgtccaggtcccttctatgggctcctcctcccctatgggcatcggaggacatcatcatcatcaccattgattctaga

SEQ ID NO: 1200 - DNA, 1338 bp, synthetic construct
  source 1..1338: mol_type = other DNA
gcggccgcaaactacaagacagacttgcaaaagaaggcatgcacagctcagcactgctctgttgcctggtcctcctgactggggtgagggccgatatccagatgacccagtccccctcctccctgtctgcttctgtgggagaccgcgtgaccattacctgtagagccggccaggacatctccaactacctgaactggtaccagcagaagcccggcaaggcccctaaactgctcatctactacacctctaggctgcattccggagtgccctcccgattctccggatctggatctggcaccgacttcaccctgactatctcctccctgcagcccgaggacttcgcaacttactactgccagcagggccacaccctcccttggacattcggtggtggcactaaagtggagatcaagcgtacggtggctgcaccatctgtcttcatcttcccgccatctgatgagcagttgaaatctggaactgcctctgttgtgtgcctgctgaataacttctatcccagagaggccaaagtacagtggaaggtggataacgccctccaatcgggtaactcccaggagagtgtcacagagcaggacagcaaggacagcacctacagcctctgtagcaccctgacgctgagcaaagcagactacgagaaacacaaagtctacgcctgcgaagtcacccatcagggcctgagttcgcccgtcacaaagagcttcaacaggggagagtctggtggtggcggatcaggtgggggaggctctggtggaggcggtagtgctgctcctcctaaagctgtgttgaagttggaacccccctggattaatgttctgcaggaggattctgtgaccctgacttgtcagggcgcccgatctcctgagtccgattctattcagtggtttcacaacgggaatttgatccccactcatacccagccttcctaccgttttaaggccaacaacaatgactctggcgagtacacctgtcagaccggccagacatccctctccgaccctgttcacctgaccgtcctctccgaatggctcgtgctccagacccctcacctggaatttcaggaaggcgagacaattatgctgcgctgtcactcctggaaggacaagcccctcgtgaaggtgaccttcttccagaatggcaagtctcagaagttttcccacctcgaccccaccttctccatccctcaggctaaccactcccattccggcgactaccactgcaccggaaacatcggctacaccctgttctcctccaagcccgtcaccatcaccgtccaggtcccttctatgggctcctcctcccctatgggcatctgattctaga

SEQ ID NO: 1201 - DNA, 1407 bp, synthetic construct
  source 1..1407: mol_type = other DNA
gcggccgcaaactacaagacagacttgcaaaagaaggcatgcacagctcagcactgctctgttgcctggtcctcctgactggggtgagggcccaggttcagctccaggagtcaggcccaggactcgttaaaccctccgagaccctctccctgacatgcacagtctccggcttctccctcacatcatacggcgtccactggatcagacagcccccaggaaaaggcctggagtggatcggagtgatctggcctggcggaggaaccaactacaacccctccctcaagtcccgcgtcaccatctctgtggatacctccaagaaccagttctccctcaaactctcttccgtgaccgccgccgacaccgctgtttattactgcgccagagaccgcgcctacggcaattacctctacgccatggactactggggccagggaaccttggtcacagtctcctccgctagcaccaaaggaccctccgtgtttcccctggccccctcttccaagtccacctccggcggaaccgccgctctgggatgtctggtgaaagattattttcccgagcccgtgaccgtgtcttggaacagcggagccctgacctccggcgtgcacacatgtcccgccgtgctgcagtctagtggcctgtattctctgtcctccgtggtgaccgtgccttcctcttccctgggcacccagacctacatctgtaacgtgaaccacaagccttccaacaccaaagtggataaaaaggtggagcccaagagctctgacaagacccacaccggtggtggcggatcaggtgggggaggctctggtggaggcggtagtgctgctcctcctaaagctgtgttgaagttggaacccccctggattaatgttctgcaggaggattctgtgaccctgacttgtcagggcgcccgatctcctgagtccgattctattcagtggtttcacaacgggaatttgatccccactcatacccagccttcctaccgttttaaggccaacaacaatgactctggcgagtacacctgtcagaccggccagacatccctctccgaccctgttcacctgaccgtcctctccgaatggctcgtgctccagacccctcacctggaatttcaggaaggcgagacaattatgctgcgctgtcactcctggaaggacaagcccctcgtgaaggtgaccttcttccagaatggcaagtctcagaagttttcccacctcgaccccaccttctccatccctcaggctaaccactcccattccggcgactaccactgcaccggaaacatcggctacaccctgttctcctccaagcccgtcaccatcaccgtccaggtcccttctatgggctcctcctcccctatgggcatcggaggacatcatcatcatcaccattgattctaga

SEQ ID NO: 1202 - DNA, 1350 bp, synthetic construct
  source 1..1350: mol_type = other DNA
gcggccgcaaactacaagacagacttgcaaaagaaggcatgcacagctcagcactgctctgttgcctggtcctcctgactggggtgagggccgatatccagatgacccagtccccctcctccctgtctgcttctgtgggagaccgcgtgaccattacctgtagagcctccgaaagcgttgaatactatgtgacctccctgatgcagtggtaccagcagaagcccggcaaggctcctaagctcctgatctacgccgcatccaacgtggactccggcgttcctagtaggttttccggctccggctccggtacagactttaccctcaccatctcctccctgcagcccgaagacttcgccacatattactgccagcagtccaggaaagtgcccttcaccttcggcggcggtaccaaagtggagatcaaacgtacggtggctgcaccatctgtcttcatcttcccgccatctgatgagcagttgaaatctggaactgcctctgttgtgtgcctgctgaataacttctatcccagagaggccaaagtacagtggaaggtggataacgccctccaatcgggtaactcccaggagagtgtcacagagcaggacagcaaggacagcacctacagcctctgtagcaccctgacgctgagcaaagcagactacgagaaacacaaagtctacgcctgcgaagtcacccatcagggcctgagttcgcccgtcacaaagagcttcaacaggggagagtctggtggtggcggatcaggtgggggaggctctggtggaggcggtagtgctgctcctcctaaagctgtgttgaagttggaacccccctggattaatgttctgcaggaggattctgtgaccctgacttgtcagggcgcccgatctcctgagtccgattctattcagtggtttcacaacgggaatttgatccccactcatacccagccttcctaccgttttaaggccaacaacaatgactctggcgagtacacctgtcagaccggccagacatccctctccgaccctgttcacctgaccgtcctctccgaatggctcgtgctccagacccctcacctggaatttcaggaaggcgagacaattatgctgcgctgtcactcctggaaggacaagcccctcgtgaaggtgaccttcttccagaatggcaagtctcagaagttttcccacctcgaccccaccttctccatccctcaggctaaccactcccattccggcgactaccactgcaccggaaacatcggctacaccctgttctcctccaagcccgtcaccatcaccgtccaggtcccttctatgggctcctcctcccctatgggcatctgattctaga

SEQ ID NO: 1203 - DNA, 1407 bp, synthetic construct
  source 1..1407: mol_type = other DNA
gcggccgcaaactacaagacagacttgcaaaagaaggcatgcacagctcagcactgctctgttgcctggtcctcctgactggggtgagggcccaggttcagctcgtccagagcggagcagaggtcaaaaagcccggcgcctccgtgaaggtgtcctgcaaggcctccggctacaccttcaccgagtacatcatccactgggtgaggcaggcccccggccagggcctggagtggatgggctggttctaccccggctccaacgacatcaactacgcccagaagttccagggcagggtgaccatgaccagggacacctccatctccaccgcctacatggagctgtcctccctgaggtccgaggacaccgccgtgtactactgcgccaggagggacgacttctccggctacgacgccctgccctactggggccagggcaccctggtgaccgtgtcctccgctagcaccaaaggaccctccgtgtttcccctggccccctcttccaagtccacctccggcggaaccgccgctctgggatgtctggtgaaagattattttcccgagcccgtgaccgtgtcttggaacagcggagccctgacctccggcgtgcacacatgtcccgccgtgctgcagtctagtggcctgtattctctgtcctccgtggtgaccgtgccttcctcttccctgggcacccagacctacatctgtaacgtgaaccacaagccttccaacaccaaagtggataaaaaggtggagcccaagagctctgacaagacccacaccggtggtggcggatcaggtgggggaggctctggtggaggcggtagtgctgctcctcctaaagctgtgttgaagttggaacccccctggattaatgttctgcaggaggattctgtgaccctgacttgtcagggcgcccgatctcctgagtccgattctattcagtggtttcacaacgggaatttgatccccactcatacccagccttcctaccgttttaaggccaacaacaatgactctggcgagtacacctgtcagaccggccagacatccctctccgaccctgttcacctgaccgtcctctccgaatggctcgtgctccagacccctcacctggaatttcaggaaggcgagacaattatgctgcgctgtcactcctggaaggacaagcccctcgtgaaggtgaccttcttccagaatggcaagtctcagaagttttcccacctcgaccccaccttctccatccctcaggctaaccactcccattccggcgactaccactgcaccggaaacatcggctacaccctgttctcctccaagcccgtcaccatcaccgtccaggtcccttctatgggctcctcctcccctatgggcatcggaggacatcatcatcatcaccattgattctaga

SEQ ID NO: 1204 - DNA, 1338 bp, synthetic construct
  source 1..1338: mol_type = other DNA
gcggccgcaaactacaagacagacttgcaaaagaaggcatgcacagctcagcactgctctgttgcctggtcctcctgactggggtgagggccgatatccagatgacccagtccccctcctccctgtctgcttctgtgggagaccgcgtgaccattacctgtagaaccaacgagaacatttactccaacctggcctggtaccagcagaagcccggaaaagcccccaaactcctcatctacgccgccacacacctggttgagggcgttccttcccgcttcagcggatctggttccggaaccgacttcactttgactatctcctccctccagcccgaggacttcgctacttactactgccagcacttctggggcaccccatgcactttcggcggaggaacaaaggtcgagatcaagcgtacggtggctgcaccatctgtcttcatcttcccgccatctgatgagcagttgaaatctggaactgcctctgttgtgtgcctgctgaataacttctatcccagagaggccaaagtacagtggaaggtggataacgccctccaatcgggtaactcccaggagagtgtcacagagcaggacagcaaggacagcacctacagcctctgtagcaccctgacgctgagcaaagcagactacgagaaacacaaagtctacgcctgcgaagtcacccatcagggcctgagttcgcccgtcacaaagagcttcaacaggggagagtctggtggtggcggatcaggtgggggaggctctggtggaggcggtagtgctgctcctcctaaagctgtgttgaagttggaacccccctggattaatgttctgcaggaggattctgtgaccctgacttgtcagggcgcccgatctcctgagtccgattctattcagtggtttcacaacgggaatttgatccccactcatacccagccttcctaccgttttaaggccaacaacaatgactctggcgagtacacctgtcagaccggccagacatccctctccgaccctgttcacctgaccgtcctctccgaatggctcgtgctccagacccctcacctggaatttcaggaaggcgagacaattatgctgcgctgtcactcctggaaggacaagcccctcgtgaaggtgaccttcttccagaatggcaagtctcagaagttttcccacctcgaccccaccttctccatccctcaggctaaccactcccattccggcgactaccactgcaccggaaacatcggctacaccctgttctcctccaagcccgtcaccatcaccgtccaggtcccttctatgggctcctcctcccctatgggcatctgattctaga

SEQ ID NO: 1205 - DNA, 1404 bp, synthetic construct
  source 1..1404: mol_type = other DNA
gcggccgcaaactacaagacagacttgcaaaagaaggcatgcacagctcagcactgctctgttgcctggtcctcctgactggggtgagggcccaggtgcagctggtgcagagtggagcagaggtgaaaaagcccggcgcctccgtgaaggtgtcctgcaaggcctccggctacaccttcacctcctactacatccactgggtgaggcaggcccccggccagggcctggagtggatgggctgcatctaccccggcaacgtgaacaccaactacgcccagaagttccagggcagggtgaccatgaccagggacacctccatctccaccgcctacatggagctgtcctccctgaggtccgaggacaccgccgtgtactactgcgccaggtcccactacggcctggactggaacttcgacgtgtggggccagggcaccctggtgaccgtgtcctccgctagcaccaaaggaccctccgtgtttcccctggccccctcttccaagtccacctccggcggaaccgccgctctgggatgtctggtgaaagattattttcccgagcccgtgaccgtgtcttggaacagcggagccctgacctccggcgtgcacacatgtcccgccgtgctgcagtctagtggcctgtattctctgtcctccgtggtgaccgtgccttcctcttccctgggcacccagacctacatctgtaacgtgaaccacaagccttccaacaccaaagtggataaaaaggtggagcccaagagctctgacaagacccacaccggtggtggcggatcaggtgggggaggctctggtggaggcggtagtgctgctcctcctaaagctgtgttgaagttggaacccccctggattaatgttctgcaggaggattctgtgaccctgacttgtcagggcgcccgatctcctgagtccgattctattcagtggtttcacaacgggaatttgatccccactcatacccagccttcctaccgttttaaggccaacaacaatgactctggcgagtacacctgtcagaccggccagacatccctctccgaccctgttcacctgaccgtcctctccgaatggctcgtgctccagacccctcacctggaatttcaggaaggcgagacaattatgctgcgctgtcactcctggaaggacaagcccctcgtgaaggtgaccttcttccagaatggcaagtctcagaagttttcccacctcgaccccaccttctccatccctcaggctaaccactcccattccggcgactaccactgcaccggaaacatcggctacaccctgttctcctccaagcccgtcaccatcaccgtccaggtcccttctatgggctcctcctcccctatgggcatcggaggacatcatcatcatcaccattgattctaga

SEQ ID NO: 1206 - DNA, 1338 bp, synthetic construct; identical to SEQ ID NO: 1129
  source 1..1338: mol_type = other DNA

SEQ ID NO: 1207 - DNA, 1404 bp, synthetic construct
  source 1..1404: mol_type = other DNA
gcggccgcaaactacaagacagacttgcaaaagaaggcatgcacagctcagcactgctctgttgcctggtcctcctgactggggtgagggcccaggtgcagctggtgcagagtggagcagaggtgaaaaagcccggcgcctccgtgaaggtgtcctgcaaggcctccggctacaccttcacctcctactacatccactgggtgaggcaggcccccggccagggcctggagtggatgggctccatctaccccggcaacgtgaacaccaactacgcccagaagttccagggcagggtgaccatgaccagggacacctccatctccaccgcctacatggagctgtcctccctgaggtccgaggacaccgccgtgtactactgcgccaggtcccactacggcctggactggaacttcgacgtgtggggccagggcaccctggtgaccgtgtcctccgctagcaccaaaggaccctccgtgtttcccctggccccctcttccaagtccacctccggcggaaccgccgctctgggatgtctggtgaaagattattttcccgagcccgtgaccgtgtcttggaacagcggagccctgacctccggcgtgcacacatgtcccgccgtgctgcagtctagtggcctgtattctctgtcctccgtggtgaccgtgccttcctcttccctgggcacccagacctacatctgtaacgtgaaccacaagccttccaacaccaaagtggataaaaaggtggagcccaagagctctgacaagacccacaccggtggtggcggatcaggtgggggaggctctggtggaggcggtagtgctgctcctcctaaagctgtgttgaagttggaacccccctggattaatgttctgcaggaggattctgtgaccctgacttgtcagggcgcccgatctcctgagtccgattctattcagtggtttcacaacgggaatttgatccccactcatacccagccttcctaccgttttaaggccaacaacaatgactctggcgagtacacctgtcagaccggccagacatccctctccgaccctgttcacctgaccgtcctctccgaatggctcgtgctccagacccctcacctggaatttcaggaaggcgagacaattatgctgcgctgtcactcctggaaggacaagcccctcgtgaaggtgaccttcttccagaatggcaagtctcagaagttttcccacctcgaccccaccttctccatccctcaggctaaccactcccattccggcgactaccactgcaccggaaacatcggctacaccctgttctcctccaagcccgtcaccatcaccgtccaggtcccttctatgggctcctcctcccctatgggcatcggaggacatcatcatcatcaccattgattctaga

SEQ ID NO: 1208 - DNA, 1338 bp, synthetic construct; identical to SEQ ID NO: 1129
  source 1..1338: mol_type = other DNA

SEQ ID NO: 1209 - DNA, 1401 bp, synthetic construct
  source 1..1401: mol_type = other DNA
gcggccgcaaactacaagacagacttgcaaaagaaggcatgcacagctcagcactgctctgttgcctggtcctcctgactggggtgagggcccaggttcagctcgtccagagcggagcagaggtcaaaaagcccggctcctccgtgaaggtgtcctgcaaggcctccggctactccatcacctccggctaccactggggctggatcaggcaggcccccggccagggcctggagtggatcggcgccatctaccactccggctccacctactactccccctccctgaagtccagggtgaccatcaccgccgacaagtccacctccaccgcctacatggagctgtcctccctgaggtccgaggacaccgccgtgtactactgcgccaggggccccctgtcctactacgccttcgactactggggccagggcaccctggtgaccgtgtcctccgctagcaccaaaggaccctccgtgtttcccctggccccctcttccaagtccacctccggcggaaccgccgctctgggatgtctggtgaaagattattttcccgagcccgtgaccgtgtcttggaacagcggagccctgacctccggcgtgcacacatgtcccgccgtgctgcagtctagtggcctgtattctctgtcctccgtggtgaccgtgccttcctcttccctgggcacccagacctacatctgtaacgtgaaccacaagccttccaacaccaaagtggataaaaaggtggagcccaagagctctgacaagacccacaccggtggtggcggatcaggtgggggaggctctggtggaggcggtagtgctgctcctcctaaagctgtgttgaagttggaacccccctggattaatgttctgcaggaggattctgtgaccctgacttgtcagggcgcccgatctcctgagtccgattctattcagtggtttcacaacgggaatttgatccccactcatacccagccttcctaccgttttaaggccaacaacaatgactctggcgagtacacctgtcagaccggccagacatccctctccgaccctgttcacctgaccgtcctctccgaatggctcgtgctccagacccctcacctggaatttcaggaaggcgagacaattatgctgcgctgtcactcctggaaggacaagcccctcgtgaaggtgaccttcttccagaatggcaagtctcagaagttttcccacctcgaccccaccttctccatccctcaggctaaccactcccattccggcgactaccactgcaccggaaacatcggctacaccctgttctcctccaagcccgtcaccatcaccgtccaggtcccttctatgggctcctcctcccctatgggcatcggaggacatcatcatcatcaccattgattctaga

SEQ ID NO: 1210 - DNA, 1338 bp, synthetic construct
  source 1..1338: mol_type = other DNA
gcggccgcaaactacaagacagacttgcaaaagaaggcatgcacagctcagcactgctctgttgcctggtcctcctgactggggtgagggccgatatccagctgacccagagcccctcctccttgtctgcatccgtgggagaccgggtgaccattacctgtagagcctcccagtccgtgtccagatacctggcttggtaccagcagaagcccggcaaagcccctaaactgctcatctatgacgcctccaacagggcaaccggcatcccttctcgcttttccggctccggaagcggaaccgatttcaccctgactatctcctccctgcagcccgaagacttcgccacttactactgccagcagtactacaggtcccccatcaccttcggccagggtacaaaggtggagatcaaacgtacggtggctgcaccatctgtcttcatcttcccgccatctgatgagcagttgaaatctggaactgcctctgttgtgtgcctgctgaataacttctatcccagagaggccaaagtacagtggaaggtggataacgccctccaatcgggtaactcccaggagagtgtcacagagcaggacagcaaggacagcacctacagcctctgtagcaccctgacgctgagcaaagcagactacgagaaacacaaagtctacgcctgcgaagtcacccatcagggcctgagttcgcccgtcacaaagagcttcaacaggggagagtctggtggtggcggatcaggtgggggaggctctggtggaggcggtagtgctgctcctcctaaagctgtgttgaagttggaacccccctggattaatgttctgcaggaggattctgtgaccctgacttgtcagggcgcccgatctcctgagtccgattctattcagtggtttcacaacgggaatttgatccccactcatacccagccttcctaccgttttaaggccaacaacaatgactctggcgagtacacctgtcagaccggccagacatccctctccgaccctgttcacctgaccgtcctctccgaatggctcgtgctccagacccctcacctggaatttcaggaaggcgagacaattatgctgcgctgtcactcctggaaggacaagcccctcgtgaaggtgaccttcttccagaatggcaagtctcagaagttttcccacctcgaccccaccttctccatccctcaggctaaccactcccattccggcgactaccactgcaccggaaacatcggctacaccctgttctcctccaagcccgtcaccatcaccgtccaggtcccttctatgggctcctcctcccctatgggcatctgattctaga

SEQ ID NO: 1211 - DNA, 1635 bp, synthetic construct
  source 1..1635: mol_type = other DNA
gcggccgcaaactacaagacagacttgcaaaagaaggcatgcacagctcagcactgctctgttgcctggtcctcctgactggggtgagggccgctgctcctcccaaggccgtgctgaagctggagcccccttggattaacgtgctccaggaagattccgtgacactcacatgtcagggcgctaggagccctgagtccgattccattcagtggttccataatggtaatctcatcccaactcatacccagccatcctataggttcaaggctaacaacaacgacagcggagagtatacctgtcagaccggccagacttcactgtccgatcctgtgcacctgaccgtgctgagcgagtggttggttctgcagacccctcacctggaatttcaggagggtgagacaatcatgttgcgatgccacagctggaaggataagcccttggtgaaggtgaccttcttccagaacggaaagagtcagaaatttagtcatctggaccccactttttccattccccaggccaaccattcacattcaggtgactaccattgcaccggaaacattggctacacactgttcagcagcaagccagtgaccattaccgtgcaggtgccctcaatgggttcaagtagcccaatgggtatcggaggcggtggaagtggcggaggagggtcagggggaggtggatctgatatccagatgacccagtccccctcctccctgtctgcttctgtgggagaccgcgtgaccattacctgtagagcctcccagcccatcggccataccttgggatggtaccagcagaagcccggcaaggctccaaaactgctcatctactgggcctctgacctgatcaggggcgtgccttctcgcttttccggaagcggatctgggacagacttcactttgactatcagcagcctgcagcccgaagacttcgccacatactactgccagcagatgctgcgcacccccttcatgtttggccagggtaccaaggtggagatcaagggtggtggcggatcaggtgggggaggctctggtggaggcggtagtgctgctcctcctaaagctgtgttgaagttggaacccccctggattaatgttctgcaggaggattctgtgaccctgacttgtcagggcgcccgatctcctgagtccgattctattcagtggtttcacaacgggaatttgatccccactcatacccagccttcctaccgttttaaggccaacaacaatgactctggcgagtacacctgtcagaccggccagacatccctctccgaccctgttcacctgaccgtcctctccgaatggctcgtgctccagacccctcacctggaatttcaggaaggcgagacaattatgctgcgctgtcactcctggaaggacaagcccctcgtgaaggtgaccttcttccagaatggcaagtctcagaagttttcccacctcgaccccaccttctccatccctcaggctaaccactcccattccggcgactaccactgcaccggaaacatcggctacaccctgttctcctccaagcccgtcaccatcaccgtccaggtcccttctatgggctcctcctcccctatgggcatcggaggacatcatcatcatcaccattgattctaga

SEQ ID NO: 1212 - DNA, 1233 bp, synthetic construct
  source 1..1233: mol_type = other DNA
gcggccgcaaactacaagacagacttgcaaaagaaggcatgcacagctcagcactgctctgttgcctggtcctcctgactggggtgagggccgaagtgcagctggtggagagcggaggaggattggtgcagcctggaggaagcctgaagctgagctgcgctgctagcggatttacctttaacaaatatgccatgaactgggtgaggcaggcccccggaaaaggattggagtgggtggctaggattaggagcaagtacaacaactacgccacctactatgccgacagcgtgaaggaccgattcaccatctccagggacgacagcaaaaacaccgcctacctgcagatgaacaacctgaagaccgaggacaccgccgtgtactactgcgtgaggcacggcaacttcggcaactcctacatctcctactgggcctactggggccagggcaccctggtgaccgtgtcctccgctagcaccaagggcccatcggtcttccccctggcaccctcctccaagagcacctctgggggcacagcggccctgggctgcctggtcaaggactacttccccgaaccggtgacggtgtcgtggaactcaggcgccctgaccagcggcgtgcacaccttcccggctgtcctacagtcctcaggactctactccctcagcagcgtggtgaccgtgccctccagcagcttgggcacccagacctacatctgcaacgtgaatcacaagcccagcaacaccaaggtggacaagaaagttgagcccaaatcttctgacaagacccacaccggtggtggcggatcaggtgggggaggctctggtggaggcggtagtcaggtgcagctggtggaaagtggcggaggactggtgcagccaggaggatctctgaggctgtcctgcgcagcaagcggactgacagtcaacgacctgtacatgggctggttcaggcaggcacccggacagggactggaagctgtggctagagtgacccccggagacaacaccgactatacctactatgccgacagcgtgaaaggaaggttcaccatctccagggataacagcaaaaacaccctgtacctgcagatgaactccctgagggccgaggacaccgccgtgtactactgcgccggcaggaggttcggctcctccgagtgggactactggggccagggcaccctggtgaccgtgtcctccggaggacatcatcatcatcaccattgattctaga

SEQ ID NO: 1213 - DNA, 1155 bp, synthetic construct
  source 1..1155: mol_type = other DNA
gcggccgcaaactacaagacagacttgcaaaagaaggcatgcacagctcagcactgctctgttgcctggtcctcctgactggggtgagggcccagaccgtcgtgacccaggaaccctccctgaccgtgagccccggcggaacagtgaccctcacctgcggaagctccaccggagccgtgacctccggaaactaccccaactgggtccagcagaaacccggccaggcccccagaggcctgatcggaggaaccaagtttttggcccccggcacccccgccagattctccggatctttgctgggcgggaaagccgccctgactctgtccggcgtgcagcctgaggatgaggcagagtactactgtgtgctgtggtatagcaacagatgggtgttcggaggcggcaccaagctgaccgtcctgagccagcccaaagccgcccccagcgtgaccctcttccccccttccagtgaggagctgcaggctaacaaggccaccctcgtgtgcctggtgtctgatttctaccccggcgccgtgaccgtggcctggaaggctgacggctcccccgtgaaggtgggcgttgagacaactaagccctccaaacagagtaacaacaaatatgccgcctcctcctacctcagcctcacccccgaacagtggaaatcccacaggagctattcctgcagagtgacccatgaaggatcaaccgtggaaaagacagtggcccccgcagagtcctccggtggtggcggatcaggtgggggaggctctggtggaggcggtagtcaggtgcagctggtggaaagtggcggaggactggtgcagccaggaggatctctgaggctgtcctgcgcagcaagcggactgacagtcaacgacctgtacatgggctggttcaggcaggcacccggacagggactggaagctgtggctagagtgacccccggagacaacaccgactatacctactatgccgacagcgtgaaaggaaggttcaccatctccagggataacagcaaaaacaccctgtacctgcagatgaactccctgagggccgaggacaccgccgtgtactactgcgccggcaggaggttcggctcctccgagtgggactactggggccagggcaccctggtgaccgtgtcctcctgattctaga

SEQ ID NO: 1214 - DNA, 1245 bp, synthetic construct
  source 1..1245: mol_type = other DNA
gcggccgcaaactacaagacagacttgcaaaagaaggcatgcacagctcagcactgctctgttgcctggtcctcctgactggggtgagggccgaagtgcagctggtggagagcggaggaggattggtgcagcctggaggaagcctgaagctgagctgcgctgctagcggatttacctttaacaaatatgccatgaactgggtgaggcaggcccccggaaaaggattggagtgggtggctaggattaggagcaagtacaacaactacgccacctactatgccgacagcgtgaaggaccgattcaccatctccagggacgacagcaaaaacaccgcctacctgcagatgaacaacctgaagaccgaggacaccgccgtgtactactgcgtgaggcacggcaacttcggcaactcctacatctcctactgggcctactggggccagggcaccctggtgaccgtgtcctccgctagcaccaagggcccatcggtcttccccctggcaccctcctccaagagcacctctgggggcacagcggccctgggctgcctggtcaaggactacttccccgaaccggtgacggtgtcgtggaactcaggcgccctgaccagcggcgtgcacaccttcccggctgtcctacagtcctcaggactctactccctcagcagcgtggtgaccgtgccctccagcagcttgggcacccagacctacatctgcaacgtgaatcacaagcccagcaacaccaaggtggacaagaaagttgagcccaaatcttctgacaagacccacaccggtggtggcggatcaggtgggggaggctctggtggaggcggtagtcaggtgcagctggtggaaagtggcggaggactggtgcagccaggaggatctctgaggctgtcctgcgcagcaagcggaagagctgtcggaaactacatcatcggctggttcaggcaggcacccggacagggactggaagctgtggctactaccacaagggacggaggcagcacctactacgccgatagcgtgaagggaaggttcaccatctccagggacaatagcaagaacaccctgtatctgcagatgaactccctgagggccgaagacacagcagtgtactactgcgccgccaagtcctggtccgtgcctctgagacctacctccgctgacttcgactcctggggacagggaaccctggtgacagtgtcctctggaggacatcatcatcatcaccattgattctaga

SEQ ID NO: 1215 - DNA, 1167 bp, synthetic construct
  source 1..1167: mol_type = other DNA
gcggccgcaaactacaagacagacttgcaaaagaaggcatgcacagctcagcactgctctgttgcctggtcctcctgactggggtgagggcccagaccgtcgtgacccaggaaccctccctgaccgtgagccccggcggaacagtgaccctcacctgcggaagctccaccggagccgtgacctccggaaactaccccaactgggtccagcagaaacccggccaggcccccagaggcctgatcggaggaaccaagtttttggcccccggcacccccgccagattctccggatctttgctgggcgggaaagccgccctgactctgtccggcgtgcagcctgaggatgaggcagagtactactgtgtgctgtggtatagcaacagatgggtgttcggaggcggcaccaagctgaccgtcctgagccagcccaaagccgcccccagcgtgaccctcttccccccttccagtgaggagctgcaggctaacaaggccaccctcgtgtgcctggtgtctgatttctaccccggcgccgtgaccgtggcctggaaggctgacggctcccccgtgaaggtgggcgttgagacaactaagccctccaaacagagtaacaacaaatatgccgcctcctcctacctcagcctcacccccgaacagtggaaatcccacaggagctattcctgcagagtgacccatgaaggatcaaccgtggaaaagacagtggcccccgcagagtcctccggtggtggcggatcaggtgggggaggctctggtggaggcggtagtcaggtgcagctggtggaaagtggcggaggactggtgcagccaggaggatctctgaggctgtcctgcgcagcaagcggaagagctgtcggaaactacatcatcggctggttcaggcaggcacccggacagggactggaagctgtggctactaccacaagggacggaggcagcacctactacgccgatagcgtgaagggaaggttcaccatctccagggacaatagcaagaacaccctgtatctgcagatgaactccctgagggccgaagacacagcagtgtactactgcgccgccaagtcctggtccgtgcctctgagacctacctccgctgacttcgactcctggggacagggaaccctggtgacagtgtcctcttgattctaga

SEQ ID NO: 1216 - DNA, 1407 bp, synthetic construct
  source 1..1407: mol_type = other DNA
gcggccgcaaactacaagacagacttgcaaaagaaggcatgcacagctcagcactgctctgttgcctggtcctcctgactggggtgagggcccaggtgcagctggtggaaagtggcggaggagtggtgcagccaggaagaagtctgaggctgtcctgcgcagcaagcggattcaccttcaccaaagcctggatgcactgggtgagacaggctcctggcaaacagctggagtgggtggctcagattaaggacaagagcaactcctacgccacctactacgccgacagcgtcaagggaaggttcacaatctccagagacgactccaaaaacaccctgtacctgcagatgaactccctgagggccgaggacaccgccgtgtactactgcaggggcgtgtactacgccctgtcccccttcgactactggggccagggcaccctggtgaccgtgtcctccgctagcaccaaaggaccctccgtgtttcccctggccccctcttccaagtccacctccggcggaaccgccgctctgggatgtctggtgaaagattattttcccgagcccgtgaccgtgtcttggaacagcggagccctgacctccggcgtgcacacatgtcccgccgtgctgcagtctagtggcctgtattctctgtcctccgtggtgaccgtgccttcctcttccctgggcacccagacctacatctgtaacgtgaaccacaagccttccaacaccaaagtggataaaaaggtggagcccaagagctctgacaagacccacaccggtggtggcggatcaggtgggggaggctctggtggaggcggtagtgctgctcctcctaaagctgtgttgaagttggaacccccctggattaatgttctgcaggaggattctgtgaccctgacttgtcagggcgcccgatctcctgagtccgattctattcagtggtttcacaacgggaatttgatccccactcatacccagccttcctaccgttttaaggccaacaacaatgactctggcgagtacacctgtcagaccggccagacatccctctccgaccctgttcacctgaccgtcctctccgaatggctcgtgctccagacccctcacctggaatttcaggaaggcgagacaattatgctgcgctgtcactcctggaaggacaagcccctcgtgaaggtgaccttcttccagaatggcaagtctcagaagttttcccacctcgaccccaccttctccatccctcaggctaaccactcccattccggcgactaccactgcaccggaaacatcggctacaccctgttctcctccaagcccgtcaccatcaccgtccaggtcccttctatgggctcctcctcccctatgggcatcggaggacatcatcatcatcaccattgattctaga

SEQ ID NO: 1217 - DNA, 1353 bp, synthetic construct
  source 1..1353: mol_type = other DNA
gcggccgcaaactacaagacagacttgcaaaagaaggcatgcacagctcagcactgctctgttgcctggtcctcctgactggggtgagggccgatatcgtgatgacccagacccccctgtccctgtctgtgacacctggacagcccgcttccatttcctgcaagtcctcccagtccctggtgcacaacaacgccaacacctacctgagctggtacctgcagaaacccggccagtcccctcagtctctgatctacaaggtctccaatcgcttctccggcgtgcccgataggttctctggaagcggatcaggaaccgacttcaccctgaagatctcccgcgtggaggctgaggacgtcggagtgtattactgcgggcagggcacccagtacccctttacattcggcagcggcaccaaagtggagatcaagcgtacggtggctgcaccatctgtcttcatcttcccgccatctgatgagcagttgaaatctggaactgcctctgttgtgtgcctgctgaataacttctatcccagagaggccaaagtacagtggaaggtggataacgccctccaatcgggtaactcccaggagagtgtcacagagcaggacagcaaggacagcacctacagcctctgtagcaccctgacgctgagcaaagcagactacgagaaacacaaagtctacgcctgcgaagtcacccatcagggcctgagttcgcccgtcacaaagagcttcaacaggggagagtctggtggtggcggatcaggtgggggaggctctggtggaggcggtagtgctgctcctcctaaagctgtgttgaagttggaacccccctggattaatgttctgcaggaggattctgtgaccctgacttgtcagggcgcccgatctcctgagtccgattctattcagtggtttcacaacgggaatttgatccccactcatacccagccttcctaccgttttaaggccaacaacaatgactctggcgagtacacctgtcagaccggccagacatccctctccgaccctgttcacctgaccgtcctctccgaatggctcgtgctccagacccctcacctggaatttcaggaaggcgagacaattatgctgcgctgtcactcctggaaggacaagcccctcgtgaaggtgaccttcttccagaatggcaagtctcagaagttttcccacctcgaccccaccttctccatccctcaggctaaccactcccattccggcgactaccactgcaccggaaacatcggctacaccctgttctcctccaagcccgtcaccatcaccgtccaggtcccttctatgggctcctcctcccctatgggcatctgattctaga

SEQ ID NO: 1218 - DNA, 1689 bp, synthetic construct
  source 1..1689: mol_type = other DNA
gcggccgcaaactacaagacagacttgcaaaagaaggcatgcacagctcagcactgctctgttgcctggtcctcctgactggggtgagggccgctgctcctcccaaggccgtgctgaagctggagcccccttggattaacgtgctccaggaagattccgtgacactcacatgtcagggcgctaggagccctgagtccgattccattcagtggttccataatggtaatctcatcccaactcatacccagccatcctataggttcaaggctaacaacaacgacagcggagagtatacctgtcagaccggccagacttcactgtccgatcctgtgcacctgaccgtgctgagcgagtggttggttctgcagacccctcacctggaatttcaggagggtgagacaatcatgttgcgatgccacagctggaaggataagcccttggtgaaggtgaccttcttccagaacggaaagagtcagaaatttagtcatctggaccccactttttccattccccaggccaaccattcacattcaggtgactaccattgcaccggaaacattggctacacactgttcagcagcaagccagtgaccattaccgtgcaggtgccctcaatgggttcaagtagcccaatgggtatcggaggcggtggaagtggcggaggagggtcagggggaggtggatctcaggtgcagctggtggaaagtggcggaggactggtgcagccaggaggatctctgaggctgtcctgcgcagcaagcggattcaccttcaataaatacgccatgaactggttccggcaggcccctggacagggactggaagctgtggctaggattaggtccaaatataacaactacgccacctattatgccgacagtgtcaaaggcaggttcaccatctccagagacaacagcaagaacaccctgtacctgcagatgaatagcctgagagccgaggacaccgcagtgtactactgtgtgaggcacggaaacttcgggaacagttacatctcctactgggcatattggggccagggcaccctggtgacagtgtcttcaggtggtggcggatcaggtgggggaggctctggtggaggcggtagtgctgctcctcctaaagctgtgttgaagttggaacccccctggattaatgttctgcaggaggattctgtgaccctgacttgtcagggcgcccgatctcctgagtccgattctattcagtggtttcacaacgggaatttgatccccactcatacccagccttcctaccgttttaaggccaacaacaatgactctggcgagtacacctgtcagaccggccagacatccctctccgaccctgttcacctgaccgtcctctccgaatggctcgtgctccagacccctcacctggaatttcaggaaggcgagacaattatgctgcgctgtcactcctggaaggacaagcccctcgtgaaggtgaccttcttccagaatggcaagtctcagaagttttcccacctcgaccccaccttctccatccctcaggctaaccactcccattccggcgactaccactgcaccggaaacatcggctacaccctgttctcctccaagcccgtcaccatcaccgtccaggtcccttctatgggctcctcctcccctatgggcatcggaggacatcatcatcatcaccattgattctaga

SEQ ID NO: 1219 - DNA, 1677 bp, synthetic construct
  source 1..1677: mol_type = other DNA
gcggccgcaaactacaagacagacttgcaaaagaaggcatgcacagctcagcactgctctgttgcctggtcctcctgactggggtgagggccgctgctcctcccaaggccgtgctgaagctggagcccccttggattaacgtgctccaggaagattccgtgacactcacatgtcagggcgctaggagccctgagtccgattccattcagtggttccataatggtaatctcatcccaactcatacccagccatcctataggttcaaggctaacaacaacgacagcggagagtatacctgtcagaccggccagacttcactgtccgatcctgtgcacctgaccgtgctgagcgagtggttggttctgcagacccctcacctggaatttcaggagggtgagacaatcatgttgcgatgccacagctggaaggataagcccttggtgaaggtgaccttcttccagaacggaaagagtcagaaatttagtcatctggaccccactttttccattccccaggccaaccattcacattcaggtgactaccattgcaccggaaacattggctacacactgttcagcagcaagccagtgaccattaccgtgcaggtgccctcaatgggttcaagtagcccaatgggtatcggaggcggtggaagtggcggaggagggtcagggggaggtggatctcaggtgcagctggtggaaagtggcggaggactggtgcagccaggaggatctctgaggctgtcctgcgcagcaagcggattcaccttcaccaaagcctggatgcactggttcaggcaggcacctggccagggactggaagctgtggctcagattaaagacaaaagcaacagctacgccacctattatgccgacagcgtcaaaggcagattcaccatcagcagagacaacagcaaaaacaccctgtacctgcagatgaactccctgagggccgaggacaccgccgtgtactactgcaggggcgtgtactacgccctgtcccccttcgactactggggccagggcaccctggtgaccgtgtcctccggtggtggcggatcaggtgggggaggctctggtggaggcggtagtgctgctcctcctaaagctgtgttgaagttggaacccccctggattaatgttctgcaggaggattctgtgaccctgacttgtcagggcgcccgatctcctgagtccgattctattcagtggtttcacaacgggaatttgatccccactcatacccagccttcctaccgttttaaggccaacaacaatgactctggcgagtacacctgtcagaccggccagacatccctctccgaccctgttcacctgaccgtcctctccgaatggctcgtgctccagacccctcacctggaatttcaggaaggcgagacaattatgctgcgctgtcactcctggaaggacaagcccctcgtgaaggtgaccttcttccagaatggcaagtctcagaagttttcccacctcgaccccaccttctccatccctcaggctaaccactcccattccggcgactaccactgcaccggaaacatcggctacaccctgttctcctccaagcccgtcaccatcaccgtccaggtcccttctatgggctcctcctcccctatgggcatcggaggacatcatcatcatcaccattgattctaga

SEQ ID NO: 1220 - DNA, 1683 bp, synthetic construct
  source 1..1683: mol_type = other DNA
gcggccgcaaactacaagacagacttgcaaaagaaggcatgcacagctcagcactgctctgttgcctggtcctcctgactggggtgagggccgctgctcctcccaaggccgtgctgaagctggagcccccttggattaacgtgctccaggaagattccgtgacactcacatgtcagggcgctaggagccctgagtccgattccattcagtggttccataatggtaatctcatcccaactcatacccagccatcctataggttcaaggctaacaacaacgacagcggagagtatacctgtcagaccggccagacttcactgtccgatcctgtgcacctgaccgtgctgagcgagtggttggttctgcagacccctcacctggaatttcaggagggtgagacaatcatgttgcgatgccacagctggaaggataagcccttggtgaaggtgaccttcttccagaacggaaagagtcagaaatttagtcatctggaccccactttttccattccccaggccaaccattcacattcaggtgactaccattgcaccggaaacattggctacacactgttcagcagcaagccagtgaccattaccgtgcaggtgccctcaatgggttcaagtagcccaatgggtatcggaggcggtggaagtggcggaggagggtcagggggaggtggatctcaggtgcagctggtggaaagtggcggaggactggtgcagccaggaggatctctgaggctgtcctgcgcagcaagcggattccctctgtcctcctacgccatgatctggttcaggcaggcccccggacagggactggaagctgtggctatgattctgagggctgggaacatctactacgccgacagtgtgaaaggcaggttcaccatctcccgggataactccaagaacacactgtatctgcagatgaatagcctgagggccgaggacaccgctgtgtattactgcgccaggaggcactacaacagggagggataccccatcggcatcggcgatctgtggggacagggaactctggtgacagtgagcagcggtggtggcggatcaggtgggggaggctctggtggaggcggtagtgctgctcctcctaaagctgtgttgaagttggaacccccctggattaatgttctgcaggaggattctgtgaccctgacttgtcagggcgcccgatctcctgagtccgattctattcagtggtttcacaacgggaatttgatccccactcatacccagccttcctaccgttttaaggccaacaacaatgactctggcgagtacacctgtcagaccggccagacatccctctccgaccctgttcacctgaccgtcctctccgaatggctcgtgctccagacccctcacctggaatttcaggaaggcgagacaattatgctgcgctgtcactcctggaaggacaagcccctcgtgaaggtgaccttcttccagaatggcaagtctcagaagttttcccacctcgaccccaccttctccatccctcaggctaaccactcccattccggcgactaccactgcaccggaaacatcggctacaccctgttctcctccaagcccgtcaccatcaccgtccaggtcccttctatgggctcctcctcccctatgggcatcggaggacatcatcatcatcaccattgattctaga

SEQ ID NO: 1221 - DNA, 1410 bp, synthetic construct
  source 1..1410: mol_type = other DNA
gcggccgcaaactacaagacagacttgcaaaagaaggcatgcacagctcagcactgctctgttgcctggtcctcctgactggggtgagggcccaggtgcagctgaagcagtccggaccaggaagcgtgcagagctctcagagcctgtccatcacctgcacagtctccggattctcactgacaacatacgccgtccactgggtcaggcagagccctggaaaaggcctggagtggctgggagtgatctggtctggcggaatcaccgactacaacgccgccttcatctcccggctgtccatcacaaaggatgactccaagagtcaggtgttcttcaagatgaatagcctgcagcccaatgataccgccatctactactgcgcccgaaacggaggagacaactacccctactactacgccatggactactggggccagggcacaagtgtgaccgtgagtagcgctagcaccaaaggaccctccgtgtttcccctggccccctcttccaagtccacctccggcggaaccgccgctctgggatgtctggtgaaagattattttcccgagcccgtgaccgtgtcttggaacagcggagccctgacctccggcgtgcacacatgtcccgccgtgctgcagtctagtggcctgtattctctgtcctccgtggtgaccgtgccttcctcttccctgggcacccagacctacatctgtaacgtgaaccacaagccttccaacaccaaagtggataaaaaggtggagcccaagagctctgacaagacccacaccggtggtggcggatcaggtgggggaggctctggtggaggcggtagtgctgctcctcctaaagctgtgttgaagttggaacccccctggattaatgttctgcaggaggattctgtgaccctgacttgtcagggcgcccgatctcctgagtccgattctattcagtggtttcacaacgggaatttgatccccactcatacccagccttcctaccgttttaaggccaacaacaatgactctggcgagtacacctgtcagaccggccagacatccctctccgaccctgttcacctgaccgtcctctccgaatggctcgtgctccagacccctcacctggaatttcaggaaggcgagacaattatgctgcgctgtcactcctggaaggacaagcccctcgtgaaggtgaccttcttccagaatggcaagtctcagaagttttcccacctcgaccccaccttctccatccctcaggctaaccactcccattccggcgactaccactgcaccggaaacatcggctacaccctgttctcctccaagcccgtcaccatcaccgtccaggtcccttctatgggctcctcctcccctatgggcatcggaggacatcatcatcatcaccattgattctaga

SEQ ID NO: 1222 - DNA, 1353 bp, synthetic construct
  source 1..1353: mol_type = other DNA
gcggccgcaaactacaagacagacttgcaaaagaaggcatgcacagctcagcactgctctgttgcctggtcctcctgactggggtgagggccgatatcgtgatgacccaggccgccttttccaaccccgtgacactgggaaccagcgcttccatctcctgcaggtcctccaagagcctgctgcacagcaacggcattacctacctgtactggtacctgcagaaacccggccagtcccctcagctgctgatctatcagatgtccaatctggcctccggcgtgcctgacagattctcatcctccggctcaggcaccgacttcaccctgagaatctccagagtggaagctgaagacgtgggcgtgtactactgcgcccagaacctggaactgcccctgacattcggcgccggaacaaagctggaactgaaacgtacggtggctgcaccatctgtcttcatcttcccgccatctgatgagcagttgaaatctggaactgcctctgttgtgtgcctgctgaataacttctatcccagagaggccaaagtacagtggaaggtggataacgccctccaatcgggtaactcccaggagagtgtcacagagcaggacagcaaggacagcacctacagcctctgtagcaccctgacgctgagcaaagcagactacgagaaacacaaagtctacgcctgcgaagtcacccatcagggcctgagttcgcccgtcacaaagagcttcaacaggggagagtctggtggtggcggatcaggtgggggaggctctggtggaggcggtagtgctgctcctcctaaagctgtgttgaagttggaacccccctggattaatgttctgcaggaggattctgtgaccctgacttgtcagggcgcccgatctcctgagtccgattctattcagtggtttcacaacgggaatttgatccccactcatacccagccttcctaccgttttaaggccaacaacaatgactctggcgagtacacctgtcagaccggccagacatccctctccgaccctgttcacctgaccgtcctctccgaatggctcgtgctccagacccctcacctggaatttcaggaaggcgagacaattatgctgcgctgtcactcctggaaggacaagcccctcgtgaaggtgaccttcttccagaatggcaagtctcagaagttttcccacctcgaccccaccttctccatccctcaggctaaccactcccattccggcgactaccactgcaccggaaacatcggctacaccctgttctcctccaagcccgtcaccatcaccgtccaggtcccttctatgggctcctcctcccctatgggcatctgattctaga

SEQ ID NO: 1223 - DNA, 1410 bp, synthetic construct
  source 1..1410: mol_type = other DNA
gcggccgcaaactacaagacagacttgcaaaagaaggcatgcacagctcagcactgctctgttgcctggtcctcctgactggggtgagggcccaggtgcagctgcaggaaagtggcccaggactggtgaaaccctccgagacactgtccctgacctgcacagtctccggcttctccctgaccacatacgccgtccactggatcagacagcccccaggaaaaggcctggagtggatcggagtcatttggtccggcggaatcaccaactacaacccctccctgaaatcaagggtgaccatctccgtggatacctccaagaaccagttcagcctgaaactgagcagcgtgaccgccgcagacaccgctgtgtattactgcgccagaaacggaggcgacaactacccctactactacgccatggattactggggccagggcaccctggtgacagtgtctagtgctagcaccaaaggaccctccgtgtttcccctggccccctcttccaagtccacctccggcggaaccgccgctctgggatgtctggtgaaagattattttcccgagcccgtgaccgtgtcttggaacagcggagccctgacctccggcgtgcacacatgtcccgccgtgctgcagtctagtggcctgtattctctgtcctccgtggtgaccgtgccttcctcttccctgggcacccagacctacatctgtaacgtgaaccacaagccttccaacaccaaagtggataaaaaggtggagcccaagagctctgacaagacccacaccggtggtggcggatcaggtgggggaggctctggtggaggcggtagtgctgctcctcctaaagctgtgttgaagttggaacccccctggattaatgttctgcaggaggattctgtgaccctgacttgtcagggcgcccgatctcctgagtccgattctattcagtggtttcacaacgggaatttgatccccactcatacccagccttcctaccgttttaaggccaacaacaatgactctggcgagtacacctgtcagaccggccagacatccctctccgaccctgttcacctgaccgtcctctccgaatggctcgtgctccagacccctcacctggaatttcaggaaggcgagacaattatgctgcgctgtcactcctggaaggacaagcccctcgtgaaggtgaccttcttccagaatggcaagtctcagaagttttcccacctcgaccccaccttctccatccctcaggctaaccactcccattccggcgactaccactgcaccggaaacatcggctacaccctgttctcctccaagcccgtcaccatcaccgtccaggtcccttctatgggctcctcctcccctatgggcatcggaggacatcatcatcatcaccattgattctaga

SEQ ID NO: 1224 - DNA, 1353 bp, synthetic construct
  source 1..1353: mol_type = other DNA
gcggccgcaaactacaagacagacttgcaaaagaaggcatgcacagctcagcactgctctgttgcctggtcctcctgactggggtgagggccgatatcgtgatgacccagtcccccctgtccctgcctgtgacacctggagaacccgcatccatctcctgcagatcctccaagagcctgctgcactccaacggcattacctacctgtactggtacctgcagaaacccggccagtcccctcagctgctgatctatcagatgtccaacctggcctccggcgtgcctgatagattctccggaagcggctccggcaccgatttcacactgaagatctccagagtggaggctgaggacgtcggcgtgtactactgcgcacagaacctggagctgcccctgacattcggcggaggaacaaaagtggagatcaagcgtacggtggctgcaccatctgtcttcatcttcccgccatctgatgagcagttgaaatctggaactgcctctgttgtgtgcctgctgaataacttctatcccagagaggccaaagtacagtggaaggtggataacgccctccaatcgggtaactcccaggagagtgtcacagagcaggacagcaaggacagcacctacagcctctgtagcaccctgacgctgagcaaagcagactacgagaaacacaaagtctacgcctgcgaagtcacccatcagggcctgagttcgcccgtcacaaagagcttcaacaggggagagtctggtggtggcggatcaggtgggggaggctctggtggaggcggtagtgctgctcctcctaaagctgtgttgaagttggaacccccctggattaatgttctgcaggaggattctgtgaccctgacttgtcagggcgcccgatctcctgagtccgattctattcagtggtttcacaacgggaatttgatccccactcatacccagccttcctaccgttttaaggccaacaacaatgactctggcgagtacacctgtcagaccggccagacatccctctccgaccctgttcacctgaccgtcctctccgaatggctcgtgctccagacccctcacctggaatttcaggaaggcgagacaattatgctgcgctgtcactcctggaaggacaagcccctcgtgaaggtgaccttcttccagaatggcaagtctcagaagttttcccacctcgaccccaccttctccatccctcaggctaaccactcccattccggcgactaccactgcaccggaaacatcggctacaccctgttctcctccaagcccgtcaccatcaccgtccaggtcccttctatgggctcctcctcccctatgggcatctgattctaga

SEQ ID NO: 1225 - DNA, 1407 bp, synthetic construct
  source 1..1407: mol_type = other DNA
gcggccgcaaactacaagacagacttgcaaaagaaggcatgcacagctcagcactgctctgttgcctggtcctcctgactggggtgagggcccaggtgcagctgcagcagtggggagctggactgctgaagccaagcgaaacactgtccctgacctgcgccgtctacggaggatctttctccggctactactggtcctggatcaggcagtcccccgagaaaggcctggagtggattggagaaattaaccacggaggatacgtgacctacaacccctccctggagagcagggtgaccatttctgtggacactagcaagaaccagttcagcctgaaactgtcttccgtgactgccgctgacaccgcagtgtattattgtgcccgcgactacggccctggcaactatgattggtacttcgacctgtggggcaggggcacactggtgacagtgagttccgctagcaccaaaggaccctccgtgtttcccctggccccctcttccaagtccacctccggcggaaccgccgctctgggatgtctggtgaaagattattttcccgagcccgtgaccgtgtcttggaacagcggagccctgacctccggcgtgcacacatgtcccgccgtgctgcagtctagtggcctgtattctctgtcctccgtggtgaccgtgccttcctcttccctgggcacccagacctacatctgtaacgtgaaccacaagccttccaacaccaaagtggataaaaaggtggagcccaagagctctgacaagacccacaccggtggtggcggatcaggtgggggaggctctggtggaggcggtagtgctgctcctcctaaagctgtgttgaagttggaacccccctggattaatgttctgcaggaggattctgtgaccctgacttgtcagggcgcccgatctcctgagtccgattctattcagtggtttcacaacgggaatttgatccccactcatacccagccttcctaccgttttaaggccaacaacaatgactctggcgagtacacctgtcagaccggccagacatccctctccgaccctgttcacctgaccgtcctctccgaatggctcgtgctccagacccctcacctggaatttcaggaaggcgagacaattatgctgcgctgtcactcctggaaggacaagcccctcgtgaaggtgaccttcttccagaatggcaagtctcagaagttttcccacctcgaccccaccttctccatccctcaggctaaccactcccattccggcgactaccactgcaccggaaacatcggctacaccctgttctcctccaagcccgtcaccatcaccgtccaggtcccttctatgggctcctcctcccctatgggcatcggaggacatcatcatcatcaccattgattctaga

SEQ ID NO: 1226 - DNA, 1344 bp, synthetic construct
  source 1..1344: mol_type = other DNA
gcggccgcaaactacaagacagacttgcaaaagaaggcatgcacagctcagcactgctctgttgcctggtcctcctgactggggtgagggccgaaatcgtgctgacccagtcccccgctaccctgtctctgtctcctggagagagggccaccctgtcttgtagggctagtcagtccgtgagctcctatctggcctggtatcagcagaagcccggccaggctcctaggctgctgatttacgacgcctccaaccgcgccacaggaatccctgctaggttcagtgggtccggctccggaacagacttcaccctgactatctcctccctggagcccgaggatttcgccgtgtactactgccagcagcggtccaactggccccctgctctgacattctgcggcggaactaaagtggagatcaaacgtacggtggctgcaccatctgtcttcatcttcccgccatctgatgagcagttgaaatctggaactgcctctgttgtgtgcctgctgaataacttctatcccagagaggccaaagtacagtggaaggtggataacgccctccaatcgggtaactcccaggagagtgtcacagagcaggacagcaaggacagcacctacagcctctgtagcaccctgacgctgagcaaagcagactacgagaaacacaaagtctacgcctgcgaagtcacccatcagggcctgagttcgcccgtcacaaagagcttcaacaggggagagtctggtggtggcggatcaggtgggggaggctctggtggaggcggtagtgctgctcctcctaaagctgtgttgaagttggaacccccctggattaatgttctgcaggaggattctgtgaccctgacttgtcagggcgcccgatctcctgagtccgattctattcagtggtttcacaacgggaatttgatccccactcatacccagccttcctaccgttttaaggccaacaacaatgactctggcgagtacacctgtcagaccggccagacatccctctccgaccctgttcacctgaccgtcctctccgaatggctcgtgctccagacccctcacctggaatttcaggaaggcgagacaattatgctgcgctgtcactcctggaaggacaagcccctcgtgaaggtgaccttcttccagaatggcaagtctcagaagttttcccacctcgaccccaccttctccatccctcaggctaaccactcccattccggcgactaccactgcaccggaaacatcggctacaccctgttctcctccaagcccgtcaccatcaccgtccaggtcccttctatgggctcctcctcccctatgggcatctgattctaga

SEQ ID NO: 1227 - DNA, 1407 bp, synthetic construct; identical to SEQ ID NO: 1225
  source 1..1407: mol_type = other DNA

SEQ ID NO: 1228 - DNA, 1344 bp, synthetic construct
  source 1..1344: mol_type = other DNA
gcggccgcaaactacaagacagacttgcaaaagaaggcatgcacagctcagcactgctctgttgcctggtcctcctgactggggtgagggccgaaatcgtgctgacccagtcccccgctaccctgtctctgtctcctggagagagggccaccctgtcttgtagggctagtcagtccgtgagctcctatctggcctggtatcagcagaagcccggccaggctcctaggctgctgatttacgacgcctccaaccgcgccacaggaatccctgctaggttcagtgggtccggctccggaacagacttcaccctgactatctcctccctggagcccgaggatttcgccgtgtactactgccagcagcggtccaactggccccctgctctgacattcggcggcggaactaaagtggagatcaaacgtacggtggctgcaccatctgtcttcatcttcccgccatctgatgagcagttgaaatctggaactgcctctgttgtgtgcctgctgaataacttctatcccagagaggccaaagtacagtggaaggtggataacgccctccaatcgggtaactcccaggagagtgtcacagagcaggacagcaaggacagcacctacagcctctgtagcaccctgacgctgagcaaagcagactacgagaaacacaaagtctacgcctgcgaagtcacccatcagggcctgagttcgcccgtcacaaagagcttcaacaggggagagtctggtggtggcggatcaggtgggggaggctctggtggaggcggtagtgctgctcctcctaaagctgtgttgaagttggaacccccctggattaatgttctgcaggaggattctgtgaccctgacttgtcagggcgcccgatctcctgagtccgattctattcagtggtttcacaacgggaatttgatccccactcatacccagccttcctaccgttttaaggccaacaacaatgactctggcgagtacacctgtcagaccggccagacatccctctccgaccctgttcacctgaccgtcctctccgaatggctcgtgctccagacccctcacctggaatttcaggaaggcgagacaattatgctgcgctgtcactcctggaaggacaagcccctcgtgaaggtgaccttcttccagaatggcaagtctcagaagttttcccacctcgaccccaccttctccatccctcaggctaaccactcccattccggcgactaccactgcaccggaaacatcggctacaccctgttctcctccaagcccgtcaccatcaccgtccaggtcccttctatgggctcctcctcccctatgggcatctgattctaga

SEQ ID NO: 1229 - DNA, 1392 bp, synthetic construct
  source 1..1392: mol_type = other DNA
gcggccgcaaactacaagacagacttgcaaaagaaggcatgcacagctcagcactgctctgttgcctggtcctcctgactggggtgagggccgaagtgcagctggtgcagagcggagcagaggtgaagaagccaggggagagcctgaggatcagctgcaagggaagcggatacagctttagcacatactggatcagctgggtgaggcagatgcccggaaaaggactggagtggatgggaaagatctacccaggagacagctacaccaactacagccccagcttccaggggcaggtgacaatcagcgctgacaaaagcatcagcaccgcctacctgcagtggtccagcctgaaggcttccgacaccgcaatgtattactgcgccaggggctacggcatcttcgactattggggccagggcaccctggtgacagtgtcttctgctagcaccaaaggaccctccgtgtttcccctggccccctcttccaagtccacctccggcggaaccgccgctctgggatgtctggtgaaagattattttcccgagcccgtgaccgtgtcttggaacagcggagccctgacctccggcgtgcacacatgtcccgccgtgctgcagtctagtggcctgtattctctgtcctccgtggtgaccgtgccttcctcttccctgggcacccagacctacatctgtaacgtgaaccacaagccttccaacaccaaagtggataaaaaggtggagcccaagagctctgacaagacccacaccggtggtggcggatcaggtgggggaggctctggtggaggcggtagtgctgctcctcctaaagctgtgttgaagttggaacccccctggattaatgttctgcaggaggattctgtgaccctgacttgtcagggcgcccgatctcctgagtccgattctattcagtggtttcacaacgggaatttgatccccactcatacccagccttcctaccgttttaaggccaacaacaatgactctggcgagtacacctgtcagaccggccagacatccctctccgaccctgttcacctgaccgtcctctccgaatggctcgtgctccagacccctcacctggaatttcaggaaggcgagacaattatgctgcgctgtcactcctggaaggacaagcccctcgtgaaggtgaccttcttccagaatggcaagtctcagaagttttcccacctcgaccccaccttctccatccctcaggctaaccactcccattccggcgactaccactgcaccggaaacatcggctacaccctgttctcctccaagcccgtcaccatcaccgtccaggtcccttctatgggctcctcctcccctatgggcatcggaggacatcatcatcatcaccattgattctaga

SEQ ID NO: 1230 - DNA, 1338 bp, synthetic construct
  source 1..1338: mol_type = other DNA
gcggccgcaaactacaagacagacttgcaaaagaaggcatgcacagctcagcactgctctgttgcctggtcctcctgactggggtgagggcctcttacgagctgacccagcccccttctgtgtctgtgtctcccggtcagaccgcctctatcacctgctctggcgacaatatcggcgaccagtacgcccactggtaccagcagaagcccggtcagagtcccgtgctggtgatttatcaggacaagaacagaccctccggaatccccgagagattcagcggttccaactccggcaacaccgccacactgactatctccggcacccaggctatggacgaagccgattactactgcgccacatacacaggattcggctccctggccgtgttcggtggaggaacaaaactgacagtcctgtctcagcctaaagccgcaccatccgtcactctgttcccgccctcctctgaggagctccaagccaacaaggccacactagtgtgtctggttagtgacttctacccgggagctgtgacagtggcctggaaggcagatggcagccccgtcaaggttggagtggagaccaccaaaccctccaaacagagcaacaacaagtacgcggcctgtagctacctgagcctgacgcccgagcagtggaagtcccacagaagctacagctgcagagtcacgcatgaagggagcaccgtggagaagacagtggcccctgctgaatcctctggtggtggcggatcaggtgggggaggctctggtggaggcggtagtgctgctcctcctaaagctgtgttgaagttggaacccccctggattaatgttctgcaggaggattctgtgaccctgacttgtcagggcgcccgatctcctgagtccgattctattcagtggtttcacaacgggaatttgatccccactcatacccagccttcctaccgttttaaggccaacaacaatgactctggcgagtacacctgtcagaccggccagacatccctctccgaccctgttcacctgaccgtcctctccgaatggctcgtgctccagacccctcacctggaatttcaggaaggcgagacaattatgctgcgctgtcactcctggaaggacaagcccctcgtgaaggtgaccttcttccagaatggcaagtctcagaagttttcccacctcgaccccaccttctccatccctcaggctaaccactcccattccggcgactaccactgcaccggaaacatcggctacaccctgttctcctccaagcccgtcaccatcaccgtccaggtcccttctatgggctcctcctcccctatgggcatctgattctaga

SEQ ID NO: 1231 - DNA, 1401 bp, synthetic construct
  source 1..1401: mol_type = other DNA
gcggccgcaaactacaagacagacttgcaaaagaaggcatgcacagctcagcactgctctgttgcctggtcctcctgactggggtgagggcccaggtgcagctggtgcagagtggagcagaggtggtgaagcccggagcaagtgtgaagctgtcctgcaaagcaagcggctacaccttcagcagctactggatgcactgggtgaagcaggcccccggacaggtgctggaatggattggagagatcaaccccggcaacggccacacaaactacaacgagaaattcaagtccaaggccacactgaccgtggacaaaagcgcctccaccgcttacatggagctgtcctccctgcgctctgaagacaccgctgtctactactgcgccaggtccttcaccaccgccagagctttcgcctactggggacagggtaccctggtgacagtgtcctccgctagcaccaaaggaccctccgtgtttcccctggccccctcttccaagtccacctccggcggaaccgccgctctgggatgtctggtgaaagattattttcccgagcccgtgaccgtgtcttggaacagcggagccctgacctccggcgtgcacacatgtcccgccgtgctgcagtctagtggcctgtattctctgtcctccgtggtgaccgtgccttcctcttccctgggcacccagacctacatctgtaacgtgaaccacaagccttccaacaccaaagtggataaaaaggtggagcccaagagctctgacaagacccacaccggtggtggcggatcaggtgggggaggctctggtggaggcggtagtgctgctcctcctaaagctgtgttgaagttggaacccccctggattaatgttctgcaggaggattctgtgaccctgacttgtcagggcgcccgatctcctgagtccgattctattcagtggtttcacaacgggaatttgatccccactcatacccagccttcctaccgttttaaggccaacaacaatgactctggcgagtacacctgtcagaccggccagacatccctctccgaccctgttcacctgaccgtcctctccgaatggctcgtgctccagacccctcacctggaatttcaggaaggcgagacaattatgctgcgctgtcactcctggaaggacaagcccctcgtgaaggtgaccttcttccagaatggcaagtctcagaagttttcccacctcgaccccaccttctccatccctcaggctaaccactcccattccggcgactaccactgcaccggaaacatcggctacaccctgttctcctccaagcccgtcaccatcaccgtccaggtcccttctatgggctcctcctcccctatgggcatcggaggacatcatcatcatcaccattgattctaga

SEQ ID NO: 1232 - DNA, 1338 bp, synthetic construct
  source 1..1338: mol_type = other DNA
gcggccgcaaactacaagacagacttgcaaaagaaggcatgcacagctcagcactgctctgttgcctggtcctcctgactggggtgagggccgatatcgtgatgacccagtcccccgccacccagtctgtgtctcctggagaaagggtgaccctgtcctgtagggcctcccagacaatctccgactacctgcactggtaccagcagaagcccggccagtctcctaggctgctgattaaatacgcctcccagtccatctccggaatcccctctcgcttttccggttccggctccggatctgacttcaccctgaccatctcctccgtggagcctgaggacttcggcgtgtactactgccaggatggccactccttcccccctactttcggcggaggtaccaagctggaaatcaagcgtacggtggctgcaccatctgtcttcatcttcccgccatctgatgagcagttgaaatctggaactgcctctgttgtgtgcctgctgaataacttctatcccagagaggccaaagtacagtggaaggtggataacgccctccaatcgggtaactcccaggagagtgtcacagagcaggacagcaaggacagcacctacagcctctgtagcaccctgacgctgagcaaagcagactacgagaaacacaaagtctacgcctgcgaagtcacccatcagggcctgagttcgcccgtcacaaagagcttcaacaggggagagtctggtggtggcggatcaggtgggggaggctctggtggaggcggtagtgctgctcctcctaaagctgtgttgaagttggaacccccctggattaatgttctgcaggaggattctgtgaccctgacttgtcagggcgcccgatctcctgagtccgattctattcagtggtttcacaacgggaatttgatccccactcatacccagccttcctaccgttttaaggccaacaacaatgactctggcgagtacacctgtcagaccggccagacatccctctccgaccctgttcacctgaccgtcctctccgaatggctcgtgctccagacccctcacctggaatttcaggaaggcgagacaattatgctgcgctgtcactcctggaaggacaagcccctcgtgaaggtgaccttcttccagaatggcaagtctcagaagttttcccacctcgaccccaccttctccatccctcaggctaaccactcccattccggcgactaccactgcaccggaaacatcggctacaccctgttctcctccaagcccgtcaccatcaccgtccaggtcccttctatgggctcctcctcccctatgggcatctgattctaga

SEQ ID NO: 1233 - DNA, 1401 bp, synthetic construct
  source 1..1401: mol_type = other DNA
gcggccgcaaactacaagacagacttgcaaaagaaggcatgcacagctcagcactgctctgttgcctggtcctcctgactggggtgagggcccaggtgcagctggtgcagagtggagcagaggtgaaaaagcccggcgcctccgtgaaggtgtcctgcaaggcctccggctacaccttctcctcctactggatgcactgggtgaggcaggcccccggccagaggctggagtggatgggcgagatcaaccccggcaacggccacaccaactactcccagaagttccagggcagggtgaccatcaccgtggacaagtccgcctccaccgcctacatggagctgtcctccctgaggtccgaggacaccgccgtgtactactgcgccaggtccttcaccaccgccagggccttcgcctactggggccagggcaccctggtgaccgtgtcctccgctagcaccaaaggaccctccgtgtttcccctggccccctcttccaagtccacctccggcggaaccgccgctctgggatgtctggtgaaagattattttcccgagcccgtgaccgtgtcttggaacagcggagccctgacctccggcgtgcacacatgtcccgccgtgctgcagtctagtggcctgtattctctgtcctccgtggtgaccgtgccttcctcttccctgggcacccagacctacatctgtaacgtgaaccacaagccttccaacaccaaagtggataaaaaggtggagcccaagagctctgacaagacccacaccggtggtggcggatcaggtgggggaggctctggtggaggcggtagtgctgctcctcctaaagctgtgttgaagttggaacccccctggattaatgttctgcaggaggattctgtgaccctgacttgtcagggcgcccgatctcctgagtccgattctattcagtggtttcacaacgggaatttgatccccactcatacccagccttcctaccgttttaaggccaacaacaatgactctggcgagtacacctgtcagaccggccagacatccctctccgaccctgttcacctgaccgtcctctccgaatggctcgtgctccagacccctcacctggaatttcaggaaggcgagacaattatgctgcgctgtcactcctggaaggacaagcccctcgtgaaggtgaccttcttccagaatggcaagtctcagaagttttcccacctcgaccccaccttctccatccctcaggctaaccactcccattccggcgactaccactgcaccggaaacatcggctacaccctgttctcctccaagcccgtcaccatcaccgtccaggtcccttctatgggctcctcctcccctatgggcatcggaggacatcatcatcatcaccattgattctaga

SEQ ID NO: 1234 - DNA, 1338 bp, synthetic construct
  source 1..1338: mol_type = other DNA
gcggccgcaaactacaagacagacttgcaaaagaaggcatgcacagctcagcactgctctgttgcctggtcctcctgactggggtgagggccgatatcgtgatgacccagtccccccccaccctgtctctgtctcctggagaaagggtgaccctgtcctgtagggcctcccagtctatttccgactacctgcactggtaccagcagaagcccggccagtctcctcgactgctgatcaagtacgcctcccagtccatcagcggcattcccgctcgtttttccggctccggatctggaaccgacttcaccctgaccatctcctccctggaacccgaagactttgccgtgtactactgccaggatggccactccttcccccctacattcggcggaggtaccaaggtggagatcaaacgtacggtggctgcaccatctgtcttcatcttcccgccatctgatgagcagttgaaatctggaactgcctctgttgtgtgcctgctgaataacttctatcccagagaggccaaagtacagtggaaggtggataacgccctccaatcgggtaactcccaggagagtgtcacagagcaggacagcaaggacagcacctacagcctctgtagcaccctgacgctgagcaaagcagactacgagaaacacaaagtctacgcctgcgaagtcacccatcagggcctgagttcgcccgtcacaaagagcttcaacaggggagagtctggtggtggcggatcaggtgggggaggctctggtggaggcggtagtgctgctcctcctaaagctgtgttgaagttggaacccccctggattaatgttctgcaggaggattctgtgaccctgacttgtcagggcgcccgatctcctgagtccgattctattcagtggtttcacaacgggaatttgatccccactcatacccagccttcctaccgttttaaggccaacaacaatgactctggcgagtacacctgtcagaccggccagacatccctctccgaccctgttcacctgaccgtcctctccgaatggctcgtgctccagacccctcacctggaatttcaggaaggcgagacaattatgctgcgctgtcactcctggaaggacaagcccctcgtgaaggtgaccttcttccagaatggcaagtctcagaagttttcccacctcgaccccaccttctccatccctcaggctaaccactcccattccggcgactaccactgcaccggaaacatcggctacaccctgttctcctccaagcccgtcaccatcaccgtccaggtcccttctatgggctcctcctcccctatgggcatctgattctaga

SEQ ID NO: 1235 - DNA, 1401 bp, synthetic construct
  source 1..1401: mol_type = other DNA
gcggccgcaaactacaagacagacttgcaaaagaaggcatgcacagctcagcactgctctgttgcctggtcctcctgactggggtgagggcccaggtgcagctggtggaaagtggcggaggagtggtgcagccaggaagaagtctgaggctgtcctgcgcagcaagcggattcaccttcagttcctatgtcctgcactgggtgaggcaggctcccggaaaaggactggactgggtggcagtgatctccgacgatggaaggaacaaatacttcgccgatagtgtgaagggcaggttcacaatcagcagggataacagcaagaacacactgtacctgcagatgaacagcctgagggccgaggacaccgctgtgtattactgcgtgcgggagggatacagcggaagctggttcgactactggggacaggggaccctggtgacagtgtcttccgctagcaccaaaggaccctccgtgtttcccctggccccctcttccaagtccacctccggcggaaccgccgctctgggatgtctggtgaaagattattttcccgagcccgtgaccgtgtcttggaacagcggagccctgacctccggcgtgcacacatgtcccgccgtgctgcagtctagtggcctgtattctctgtcctccgtggtgaccgtgccttcctcttccctgggcacccagacctacatctgtaacgtgaaccacaagccttccaacaccaaagtggataaaaaggtggagcccaagagctctgacaagacccacaccggtggtggcggatcaggtgggggaggctctggtggaggcggtagtgctgctcctcctaaagctgtgttgaagttggaacccccctggattaatgttctgcaggaggattctgtgaccctgacttgtcagggcgcccgatctcctgagtccgattctattcagtggtttcacaacgggaatttgatccccactcatacccagccttcctaccgttttaaggccaacaacaatgactctggcgagtacacctgtcagaccggccagacatccctctccgaccctgttcacctgaccgtcctctccgaatggctcgtgctccagacccctcacctggaatttcaggaaggcgagacaattatgctgcgctgtcactcctggaaggacaagcccctcgtgaaggtgaccttcttccagaatggcaagtctcagaagttttcccacctcgaccccaccttctccatccctcaggctaaccactcccattccggcgactaccactgcaccggaaacatcggctacaccctgttctcctccaagcccgtcaccatcaccgtccaggtcccttctatgggctcctcctcccctatgggcatcggaggacatcatcatcatcaccattgattctaga

SEQ ID NO: 1236 - DNA, 1338 bp, synthetic construct
  source 1..1338: mol_type = other DNA
gcggccgcaaactacaagacagacttgcaaaagaaggcatgcacagctcagcactgctctgttgcctggtcctcctgactggggtgagggccgctattcagctgacccagtccccctcctccctgtctgcttctgtgggagatcgtgtgaccattacctgtcgggcctcccagggaatttcctccgctctggcttggtaccagcagaagcccggaaaggcccctaaactgctgatctacggcgccagttccctggagggaggagtgccttctcggtttagtggaagcggctctggcaccgacttcaccctgactatctcctccctgcagcccgaagacttcgccacatactactgccagcagttcaactcctaccccttcaccttcggccccggaacaaaagtggacatcaagcgtacggtggctgcaccatctgtcttcatcttcccgccatctgatgagcagttgaaatctggaactgcctctgttgtgtgcctgctgaataacttctatcccagagaggccaaagtacagtggaaggtggataacgccctccaatcgggtaactcccaggagagtgtcacagagcaggacagcaaggacagcacctacagcctctgtagcaccctgacgctgagcaaagcagactacgagaaacacaaagtctacgcctgcgaagtcacccatcagggcctgagttcgcccgtcacaaagagcttcaacaggggagagtctggtggtggcggatcaggtgggggaggctctggtggaggcggtagtgctgctcctcctaaagctgtgttgaagttggaacccccctggattaatgttctgcaggaggattctgtgaccctgacttgtcagggcgcccgatctcctgagtccgattctattcagtggtttcacaacgggaatttgatccccactcatacccagccttcctaccgttttaaggccaacaacaatgactctggcgagtacacctgtcagaccggccagacatccctctccgaccctgttcacctgaccgtcctctccgaatggctcgtgctccagacccctcacctggaatttcaggaaggcgagacaattatgctgcgctgtcactcctggaaggacaagcccctcgtgaaggtgaccttcttccagaatggcaagtctcagaagttttcccacctcgaccccaccttctccatccctcaggctaaccactcccattccggcgactaccactgcaccggaaacatcggctacaccctgttctcctccaagcccgtcaccatcaccgtccaggtcccttctatgggctcctcctcccctatgggcatctgattctaga

SEQ ID NO: 1237 - DNA, 1401 bp, synthetic construct
  source 1..1401: mol_type = other DNA
gcggccgcaaactacaagacagacttgcaaaagaaggcatgcacagctcagcactgctctgttgcctggtcctcctgactggggtgagggcccaggtgcagctggtggaaagtggcggaggagtggtgcagccaggaagaagtctgaggctgtcctgcgcagcaagcggattcaccttcagttcctatgccatgcactgggtgaggcaggctcccggaaaaggactggagtgggtggctgtgatttcctacgatggaaggaacaaggattacgccgatagtgtgaagggccggttcaccatctcccgcgataatagcaagaacacactgtacctgcagatgaacagcctgagggccgaggacaccgctgtgcattactgcgcaaggctggattggggctatgacgctttcgacatctggggccagggaacaatggtgaccgtctcctccgctagcaccaaaggaccctccgtgtttcccctggccccctcttccaagtccacctccggcggaaccgccgctctgggatgtctggtgaaagattattttcccgagcccgtgaccgtgtcttggaacagcggagccctgacctccggcgtgcacacatgtcccgccgtgctgcagtctagtggcctgtattctctgtcctccgtggtgaccgtgccttcctcttccctgggcacccagacctacatctgtaacgtgaaccacaagccttccaacaccaaagtggataaaaaggtggagcccaagagctctgacaagacccacaccggtggtggcggatcaggtgggggaggctctggtggaggcggtagtgctgctcctcctaaagctgtgttgaagttggaacccccctggattaatgttctgcaggaggattctgtgaccctgacttgtcagggcgcccgatctcctgagtccgattctattcagtggtttcacaacgggaatttgatccccactcatacccagccttcctaccgttttaaggccaacaacaatgactctggcgagtacacctgtcagaccggccagacatccctctccgaccctgttcacctgaccgtcctctccgaatggctcgtgctccagacccctcacctggaatttcaggaaggcgagacaattatgctgcgctgtcactcctggaaggacaagcccctcgtgaaggtgaccttcttccagaatggcaagtctcagaagttttcccacctcgaccccaccttctccatccctcaggctaaccactcccattccggcgactaccactgcaccggaaacatcggctacaccctgttctcctccaagcccgtcaccatcaccgtccaggtcccttctatgggctcctcctcccctatgggcatcggaggacatcatcatcatcaccattgattctaga

SEQ ID NO: 1238 - DNA, 1344 bp, synthetic construct
  source 1..1344: mol_type = other DNA
gcggccgcaaactacaagacagacttgcaaaagaaggcatgcacagctcagcactgctctgttgcctggtcctcctgactggggtgagggccgaaatcgtgctgacccagtcccccggaaccctgtctctgtctcctggagagagggccaccctgtcttgtagggctagtcagtccgtgagctccagctatctggcctggtatcagcagaagcccggccaggctcctcgtctgctgatttacggcgcctcctctagggccaccggaatccctgataggttcagcggctccggctccggaacagatttcaccctgaccatctcccggctggaacccgaagatttcgctgtgtactactgccagcagtacggcagttcccccccttacacctttggacagggcaccaagctggagatcaagcgtacggtggctgcaccatctgtcttcatcttcccgccatctgatgagcagttgaaatctggaactgcctctgttgtgtgcctgctgaataacttctatcccagagaggccaaagtacagtggaaggtggataacgccctccaatcgggtaactcccaggagagtgtcacagagcaggacagcaaggacagcacctacagcctctgtagcaccctgacgctgagcaaagcagactacgagaaacacaaagtctacgcctgcgaagtcacccatcagggcctgagttcgcccgtcacaaagagcttcaacaggggagagtctggtggtggcggatcaggtgggggaggctctggtggaggcggtagtgctgctcctcctaaagctgtgttgaagttggaacccccctggattaatgttctgcaggaggattctgtgaccctgacttgtcagggcgcccgatctcctgagtccgattctattcagtggtttcacaacgggaatttgatccccactcatacccagccttcctaccgttttaaggccaacaacaatgactctggcgagtacacctgtcagaccggccagacatccctctccgaccctgttcacctgaccgtcctctccgaatggctcgtgctccagacccctcacctggaatttcaggaaggcgagacaattatgctgcgctgtcactcctggaaggacaagcccctcgtgaaggtgaccttcttccagaatggcaagtctcagaagttttcccacctcgaccccaccttctccatccctcaggctaaccactcccattccggcgactaccactgcaccggaaacatcggctacaccctgttctcctccaagcccgtcaccatcaccgtccaggtcccttctatgggctcctcctcccctatgggcatctgattctaga

SEQ ID NO: 1239 - DNA, 1413 bp, synthetic construct
  source 1..1413: mol_type = other DNA
gcggccgcaaactacaagacagacttgcaaaagaaggcatgcacagctcagcactgctctgttgcctggtcctcctgactggggtgagggccgaaatccagctgcagcagaccgggcctgagctggtgaaaccaggagctagcgtgaagatcagctgcaaagcctccgggtacagcttcaccgactacatcatcttttgggtgaagcagagccacggcaaatccctggaatggaccggcaacatcaacccctactacggaagcacctcctacaacctgaaattcaagggcaaagccaccctgaccgtggacaagtccagttccaccgcctacatgcagctgaacagcctgaccagcgaagacagcgccgtgtactactgcgtgcggggagtgtactactacggaagctcctacgaagccttcccctactggggccagggtacactggtgacagtctccgcagctagcaccaaaggaccctccgtgtttcccctggccccctcttccaagtccacctccggcggaaccgccgctctgggatgtctggtgaaagattattttcccgagcccgtgaccgtgtcttggaacagcggagccctgacctccggcgtgcacacatgtcccgccgtgctgcagtctagtggcctgtattctctgtcctccgtggtgaccgtgccttcctcttccctgggcacccagacctacatctgtaacgtgaaccacaagccttccaacaccaaagtggataaaaaggtggagcccaagagctctgacaagacccacaccggtggtggcggatcaggtgggggaggctctggtggaggcggtagtgctgctcctcctaaagctgtgttgaagttggaacccccctggattaatgttctgcaggaggattctgtgaccctgacttgtcagggcgcccgatctcctgagtccgattctattcagtggtttcacaacgggaatttgatccccactcatacccagccttcctaccgttttaaggccaacaacaatgactctggcgagtacacctgtcagaccggccagacatccctctccgaccctgttcacctgaccgtcctctccgaatggctcgtgctccagacccctcacctggaatttcaggaaggcgagacaattatgctgcgctgtcactcctggaaggacaagcccctcgtgaaggtgaccttcttccagaatggcaagtctcagaagttttcccacctcgaccccaccttctccatccctcaggctaaccactcccattccggcgactaccactgcaccggaaacatcggctacaccctgttctcctccaagcccgtcaccatcaccgtccaggtcccttctatgggctcctcctcccctatgggcatcggaggacatcatcatcatcaccattgattctaga

SEQ ID NO: 1240 - DNA, 1353 bp, synthetic construct
  source 1..1353: mol_type = other DNA
gcggccgcaaactacaagacagacttgcaaaagaaggcatgcacagctcagcactgctctgttgcctggtcctcctgactggggtgagggccgatatccagctgacccagagccccctgaccctgtctatcaccattggccagcccgcctccatctcctgtaaaagcagccagtccctgctggactccgacggaaagacctacctgaactggctgctgcagcggccaggacagtctcctacaaggctgatctacctggtctccaagctggactccggagtgccagaccgattcaccggaagcggttccggaacagacttcaccctgaagatctccagggtcgaagccgaagacctgggcatctactactgctggcagggcgcacactttccccagacattcggaggcggcaccaaactggagatcaagcgtacggtggctgcaccatctgtcttcatcttcccgccatctgatgagcagttgaaatctggaactgcctctgttgtgtgcctgctgaataacttctatcccagagaggccaaagtacagtggaaggtggataacgccctccaatcgggtaactcccaggagagtgtcacagagcaggacagcaaggacagcacctacagcctctgtagcaccctgacgctgagcaaagcagactacgagaaacacaaagtctacgcctgcgaagtcacccatcagggcctgagttcgcccgtcacaaagagcttcaacaggggagagtctggtggtggcggatcaggtgggggaggctctggtggaggcggtagtgctgctcctcctaaagctgtgttgaagttggaacccccctggattaatgttctgcaggaggattctgtgaccctgacttgtcagggcgcccgatctcctgagtccgattctattcagtggtttcacaacgggaatttgatccccactcatacccagccttcctaccgttttaaggccaacaacaatgactctggcgagtacacctgtcagaccggccagacatccctctccgaccctgttcacctgaccgtcctctccgaatggctcgtgctccagacccctcacctggaatttcaggaaggcgagacaattatgctgcgctgtcactcctggaaggacaagcccctcgtgaaggtgaccttcttccagaatggcaagtctcagaagttttcccacctcgaccccaccttctccatccctcaggctaaccactcccattccggcgactaccactgcaccggaaacatcggctacaccctgttctcctccaagcccgtcaccatcaccgtccaggtcccttctatgggctcctcctcccctatgggcatctgattctaga

SEQ ID NO: 1241 - DNA, 1413 bp, synthetic construct
  source 1..1413: mol_type = other DNA
gcggccgcaaactacaagacagacttgcaaaagaaggcatgcacagctcagcactgctctgttgcctggtcctcctgactggggtgagggcccaggtgcagctggtgcagagtggagcagaggtgaaaaagcccggcgcctccgtgaaggtgtcctgcaaggcctccggctactccttcaccgactacatcatcttctgggtgaggcaggcccccggccagggcctggagtggatgggcaacatcaacccctactacggctccaccaactacgcccagaagttccagggcagggtgaccatgaccagggacacctccatctccaccgcctacatggagctgtcctccctgaggtccgaggacaccgccgtgtactactgcgccaggggcgtgtactactacggctcctcctacgaggccttcccctactggggccagggcaccctggtgaccgtgtcctccgctagcaccaaaggaccctccgtgtttcccctggccccctcttccaagtccacctccggcggaaccgccgctctgggatgtctggtgaaagattattttcccgagcccgtgaccgtgtcttggaacagcggagccctgacctccggcgtgcacacatgtcccgccgtgctgcagtctagtggcctgtattctctgtcctccgtggtgaccgtgccttcctcttccctgggcacccagacctacatctgtaacgtgaaccacaagccttccaacaccaaagtggataaaaaggtggagcccaagagctctgacaagacccacaccggtggtggcggatcaggtgggggaggctctggtggaggcggtagtgctgctcctcctaaagctgtgttgaagttggaacccccctggattaatgttctgcaggaggattctgtgaccctgacttgtcagggcgcccgatctcctgagtccgattctattcagtggtttcacaacgggaatttgatccccactcatacccagccttcctaccgttttaaggccaacaacaatgactctggcgagtacacctgtcagaccggccagacatccctctccgaccctgttcacctgaccgtcctctccgaatggctcgtgctccagacccctcacctggaatttcaggaaggcgagacaattatgctgcgctgtcactcctggaaggacaagcccctcgtgaaggtgaccttcttccagaatggcaagtctcagaagttttcccacctcgaccccaccttctccatccctcaggctaaccactcccattccggcgactaccactgcaccggaaacatcggctacaccctgttctcctccaagcccgtcaccatcaccgtccaggtcccttctatgggctcctcctcccctatgggcatcggaggacatcatcatcatcaccattgattctaga

SEQ ID NO: 1242 - DNA, 1353 bp, synthetic construct
  source 1..1353: mol_type = other DNA
gcggccgcaaactacaagacagacttgcaaaagaaggcatgcacagctcagcactgctctgttgcctggtcctcctgactggggtgagggccgatatcgtgatgacccagtcccccctgtccctgcctgtgacacctggagaacccgcatccatctcctgcaagtcctcccagtccctgctggactccgacggaaagacctacctgaactggtacctgcagaaacccggccagtcccctcagctgctgatctatctggtgtccaagctggactccggcgtgcctgataggttctccggaagcggttcagggaccgacttcaccctgaaaatctccagggtcgaggctgaggacgtgggagtgtactactgctggcagggcgcacactttccccagacatttggaggcggcactaaggtggagatcaaacgtacggtggctgcaccatctgtcttcatcttcccgccatctgatgagcagttgaaatctggaactgcctctgttgtgtgcctgctgaataacttctatcccagagaggccaaagtacagtggaaggtggataacgccctccaatcgggtaactcccaggagagtgtcacagagcaggacagcaaggacagcacctacagcctctgtagcaccctgacgctgagcaaagcagactacgagaaacacaaagtctacgcctgcgaagtcacccatcagggcctgagttcgcccgtcacaaagagcttcaacaggggagagtctggtggtggcggatcaggtgggggaggctctggtggaggcggtagtgctgctcctcctaaagctgtgttgaagttggaacccccctggattaatgttctgcaggaggattctgtgaccctgacttgtcagggcgcccgatctcctgagtccgattctattcagtggtttcacaacgggaatttgatccccactcatacccagccttcctaccgttttaaggccaacaacaatgactctggcgagtacacctgtcagaccggccagacatccctctccgaccctgttcacctgaccgtcctctccgaatggctcgtgctccagacccctcacctggaatttcaggaaggcgagacaattatgctgcgctgtcactcctggaaggacaagcccctcgtgaaggtgaccttcttccagaatggcaagtctcagaagttttcccacctcgaccccaccttctccatccctcaggctaaccactcccattccggcgactaccactgcaccggaaacatcggctacaccctgttctcctccaagcccgtcaccatcaccgtccaggtcccttctatgggctcctcctcccctatgggcatctgattctaga

SEQ ID NO: 1243 - DNA, 1221 bp, synthetic construct
  source 1..1221: mol_type = other DNA
gcggccgcaaactacaagacagacttgcaaaagaaggcatgcacagctcagcactgctctgttgcctggtcctcctgactggggtgagggccgaagtgcagctggtggagagcggaggaggattggtgcagcctggaggaagcctgaagctgagctgcgctgctagcggatttacctttaacaaatatgccatgaactgggtgaggcaggcccccggaaaaggattggagtgggtggctaggattaggagcaagtacaacaactacgccacctactatgccgacagcgtgaaggaccgattcaccatctccagggacgacagcaaaaacaccgcctacctgcagatgaacaacctgaagaccgaggacaccgccgtgtactactgcgtgaggcacggcaacttcggcaactcctacatctcctactgggcctactggggccagggcaccctggtgaccgtgtcctccgctagcaccaagggcccatcggtcttccccctggcaccctcctccaagagcacctctgggggcacagcggccctgggctgcctggtcaaggactacttccccgaaccggtgacggtgtcgtggaactcaggcgccctgaccagcggcgtgcacaccttcccggctgtcctacagtcctcaggactctactccctcagcagcgtggtgaccgtgccctccagcagcttgggcacccagacctacatctgcaacgtgaatcacaagcccagcaacaccaaggtggacaagaaagttgagcccaaatcttctgacaagacccacaccggtggtggcggatcaggtgggggaggctctggtggaggcggtagtcaggtgcagctggtggaaagtggcggaggactggtgcagccaggaggatctctgaggctgtcctgcgcagcaagcggatacacattcaccaactactggatcaactggttcaggcaggcacccggccagggactggaagctgtggctgatatttaccccggaggggggatcacatactacgccgatagtgtgaaaggcaggttcaccatctcccgggacaactccaagaacaccctgtacctgcagatgaactccctgagggccgaggacacagccgtgtattactgcgccgcctcctacggtaagtacttcgattactggggccagggcacactggtgaccgtgtcttctggaggacatcatcatcatcaccattgattctaga

SEQ ID NO: 1244 - DNA, 1143 bp, synthetic construct
  source 1..1143: mol_type = other DNA
gcggccgcaaactacaagacagacttgcaaaagaaggcatgcacagctcagcactgctctgttgcctggtcctcctgactggggtgagggcccagaccgtcgtgacccaggaaccctccctgaccgtgagccccggcggaacagtgaccctcacctgcggaagctccaccggagccgtgacctccggaaactaccccaactgggtccagcagaaacccggccaggcccccagaggcctgatcggaggaaccaagtttttggcccccggcacccccgccagattctccggatctttgctgggcgggaaagccgccctgactctgtccggcgtgcagcctgaggatgaggcagagtactactgtgtgctgtggtatagcaacagatgggtgttcggaggcggcaccaagctgaccgtcctgagccagcccaaagccgcccccagcgtgaccctcttccccccttccagtgaggagctgcaggctaacaaggccaccctcgtgtgcctggtgtctgatttctaccccggcgccgtgaccgtggcctggaaggctgacggctcccccgtgaaggtgggcgttgagacaactaagccctccaaacagagtaacaacaaatatgccgcctcctcctacctcagcctcacccccgaacagtggaaatcccacaggagctattcctgcagagtgacccatgaaggatcaaccgtggaaaagacagtggcccccgcagagtcctccggtggtggcggatcaggtgggggaggctctggtggaggcggtagtcaggtgcagctggtggaaagtggcggaggactggtgcagccaggaggatctctgaggctgtcctgcgcagcaagcggatacacattcaccaactactggatcaactggttcaggcaggcacccggccagggactggaagctgtggctgatatttaccccggaggggggatcacatactacgccgatagtgtgaaaggcaggttcaccatctcccgggacaactccaagaacaccctgtacctgcagatgaactccctgagggccgaggacacagccgtgtattactgcgccgcctcctacggtaagtacttcgattactggggccagggcacactggtgaccgtgtcttcttgattctaga

SEQ ID NO: 1245 - DNA, 1443 bp, synthetic construct
  source 1..1443: mol_type = other DNA
gcggccgcaaactacaagacagacttgcaaaagaaggcatgcacagctcagcactgctctgttgcctggtcctcctgactggggtgagggcccaggttcagctcgtccagagcggagcagaggtcaaaaagcccggcgcctccgtgaaggtgtcctgcaaggcctccggctacaccttcaccaactactggatcaactgggtgaggcaggcccccggccagggcctggagtggatgggcgacatctaccccggcggcggcatcaccaactacgcccagaagttccagggcagggtgaccatgaccagggacacctccatctccaccgcctacatggagctgtcctccctgaggtccgaggacaccgccgtgtactactgcgccaggtcctacggcaagtacttcgactactggggccagggcaccctggtgaccgtgtcctccgctagcaccaagggcccatcggtcttccccctggcaccctcctccaagagcacctctgggggcacagcggccctgggctgcctggtcaaggactacttccccgaaccggtgacggtgtcgtggaactcaggcgccctgaccagcggcgtgcacacctgtccggctgtcctacagtcctcaggactctactccctcagcagcgtggtgaccgtgccctccagcagcttgggcacccagacctacatctgcaacgtgaatcacaagcccagcaacaccaaggtggacaagaaagttgagcccaaatcttctgacaaaactcacacatgcccaccgtgcccagcacctgaagccgcagggggaccgtcagtcttcctcttccccccaaaacccaaggacaccctcatgatctcccggacccccgaggtcacatgcgtggtggtggacgtgagccacgaagaccctgaggtcaagttcaagtggtacgtggacggcgtggaggtgcataatgccaagacaaagccgcgggaggagcagtacaacagcacgtaccgtgtggtcagcgtcctcaccgtcgttcaccaggactggctgaatggcaaggagtacaagtgcaaggtctccaacaaagccctcgctgcccccatcgagaaaaccatctccaaagccaaagggcagccccgagaaccacaggtgtacaccctgcccccatcccgggacgagctgaccaagaaccaggtcagcctgtggtgcctggtcaaaggcttctatcccagcgacatcgccgtggagtgggagagcaatgggcagccggagaacaactacaagaccacgcctcccgtgctggactccgacggctccttcttcctctacagcaagctcaccgtggacaagagcaggtggcagcaggggaacgtcttctcatgctccgtgatgcatgaggctctgcacaaccactacacgcagaagagcctctccctgtctccgggtaaatgattctaga

SEQ ID NO: 1246 - DNA, 744 bp, synthetic construct
  source 1..744: mol_type = other DNA
gcggccgcaaactacaagacagacttgcaaaagaaggcatgcacagctcagcactgctctgttgcctggtcctcctgactggggtgagggccgatatccagatgacccagtccccctcctccctgtctgcttctgtgggagaccgcgtgaccattacctgtaaagctagccaggacatcaagtcctacctgacctggtaccagcagaagcccggcaaggctccaaaactgctcatctactactccacccggctggctgacggcgttccttctaggttctccggcagcggaagcggaaccgatttcaccctcaccatctcctccctgcagcccgaagacttcgccacatactactgcctgcagcacgacgaaagtcccttcacctttggcggcggtaccaaagtggagatcaaacgtacggtggctgcaccatctgtcttcatcttcccgccatctgatgagcagttgaaatctggaactgcctctgttgtgtgcctgctgaataacttctatcccagagaggccaaagtacagtggaaggtggataacgccctccaatcgggtaactcccaggagagtgtcacagagcaggacagcaaggacagcacctacagcctctgtagcaccctgacgctgagcaaagcagactacgagaaacacaaagtctacgcctgcgaagtcacccatcagggcctgagttcgcccgtcacaaagagcttcaacaggggagagtcttgattctaga

SEQ ID NO: 1247 - DNA, 1443 bp, synthetic construct
  source 1..1443: mol_type = other DNA
gcggccgcaaactacaagacagacttgcaaaagaaggcatgcacagctcagcactgctctgttgcctggtcctcctgactggggtgagggcccaggttcagctcgtccagagcggagcagaggtcaaaaagcccggcgcctccgtgaaggtgtcctgcaaggcctccggctacaccttcaccaactactggatcaactgggtgaggcaggcccccggccagggcctggagtggatgggcgacatctaccccggcggcggcatcaccaactacgcccagaagttccagggcagggtgaccatgaccagggacacctccatctccaccgcctacatggagctgtcctccctgaggtccgaggacaccgccgtgtactactgcgccaggtcctacggcaagtacttcgactactggggccagggcaccctggtgaccgtgtcctccgctagcacaaagggacctagcgtgtttcctctggctccatcatccaagagcacctctggaggaactgccgctctgggatgtctggtgaaagattatttccctgaacccgtgaccgtgagttggaactcaggcgctctgacctccggagtgcatacattccctgccgtgctgcagagtagtggcctgtattccctgtcctccgtcgtcacagtgccctcttcttccctgggaacccagacatacatctgtaacgtgaaccacaaaccctccaacaccaaagtggataagaaggtggagcccaagagctctgataagacccatacctgccctccttgcccagctcctgaagctgctgggggaccgtcagtcttcctcttccccccaaaacccaaggacaccctcatgatctcccggacccccgaggtcacatgcgtggtggtggacgtgagccacgaagaccctgaggtcaagttcaagtggtacgtggacggcgtggaggtgcataatgccaagacaaagccgcgggaggagcagtacaacagcacgtaccgtgtggtcagcgtcctcaccgtcgttcaccaggactggctgaatggcaaggagtacaagtgcaaggtctccaacaaagccctcgctgcccccatcgagaaaaccatctccaaagccaaagggcagccccgagaaccacaggtgtacaccctgcccccatcccgggacgagctgaccaagaaccaggtcagcctgagctgcgccgtcaaaggcttctatcccagcgacatcgccgtggagtgggagagcaatgggcagccggagaacaactacaagaccacgcctcccgtgctggactccgacggctccttcttcctcgtgagcaagctcaccgtggacaagagcaggtggcagcaggggaacgtcttctcatgctccgtgatgcatgaggctctgcacaaccactacacgcagaagagcctctccctgtctccgggtaaatgattctaga

SEQ ID NO: 1248 - DNA, 1551 bp, synthetic construct
  source 1..1551: mol_type = other DNA
gcggccgcaaactacaagacagacttgcaaaagaaggcatgcacagctcagcactgctctgttgcctggtcctcctgactggggtgagggccgatatccagatgacccagtccccctcctccctgtctgcttctgtgggagaccgcgtgaccattacctgtaaagctagccaggacatcaagtcctacctgacctggtaccagcagaagcccggcaaggctccaaaactgctcatctactactccacccggctggctgacggcgttccttctaggttctccggcagcggaagcggaaccgatttcaccctcaccatctcctccctgcagcccgaagacttcgccacatactactgcctgcagcacgacgaaagtcccttcacctttggcggcggtaccaaagtggagatcaaacgtacggtggctgcaccatctgtcttcatcttcccgccatctgatgagcagttgaaatctggaactgcctctgttgtgtgcctgctgaataacttctatcccagagaggccaaagtacagtggaaggtggataacgccctccaatcgggtaactcccaggagagtgtcacagagcaggacagcaaggacagcacctacagcctcagcagcaccctgacgctgagcaaagcagactacgagaaacacaaagtctacgcctgcgaagtcacccatcagggcctgagttcgcccgtcacaaagagcttcaacaggggagagagtggtggtggcggatcaggtgggggaggctctggtggaggcggtagtgaagtgcagctggtggagagcggaggaggattggtgcagcctggaggaagcctgaagctgagctgcgctgctagcggatttacctttaacaaatatgccatgaactgggtgaggcaggcccccggaaaaggattggagtgggtggctaggattaggagcaagtacaacaactacgccacctactatgccgacagcgtgaaggaccgattcaccatctccagggacgacagcaaaaacaccgcctacctgcagatgaacaacctgaagaccgaggacaccgccgtgtactactgcgtgaggcacggcaacttcggcaactcctacatctcctactgggcctactggggccagggcaccctggtgaccgtgtcctccggtggcggagggtctggtggtggaggatccgggggaggaggttcaggaggcgggggaagtcagaccgtcgtgacccaggaaccctccctgaccgtgagccccggcggaacagtgaccctcacctgcggaagctccaccggagccgtgacctccggaaactaccccaactgggtccagcagaaacccggccaggcccccagaggcctgatcggaggaaccaagtttttggcccccggcacccccgccagattctccggatctttgctgggcgggaaagccgccctgactctgtccggcgtgcagcctgaggatgaggcagagtactactgtgtgctgtggtatagcaacagatgggtgttcggaggcggcaccaagctgaccgtcctgtgattctaga

SEQ ID NO: 1249 - DNA, 1890 bp, synthetic construct
  source 1..1890: mol_type = other DNA
gcggccgcaaactacaagacagacttgcaaaagaaggcatgcacagctcagcactgctctgttgcctggtcctcctgactggggtgagggccgatatccagatgacccagtcccctagcagcctgagcgccagcgtgggcgatagggtgaccatcacctgtaaagcctcccaggacatcaagagctacctgacatggtaccagcagaagcctggaaaggctccaaagctcctgatttattattcaacaaggctggccgacggtgttccttctcgtttctccggctcagggtctggaaccgacttcaccctgactatctcaagtctgcagcccgaagattttgctacctactattgtctgcagcacgacgagagtccattcaccttcggcggtggcaccaaagtcgaaattaagagaaccgtggcagcaccagatatccagatgacccagtccccctcctccctgtctgcttctgtgggagaccgcgtgaccattacctgtaaagctagccaggacatcaagtcctacctgacctggtaccagcagaagcccggcaaggctccaaaactgctcatctactactccacccggctggctgacggcgttccttctaggttctccggcagcggaagcggaaccgatttcaccctcaccatctcctccctgcagcccgaagacttcgccacatactactgcctgcagcacgacgaaagtcccttcacctttggcggcggtaccaaagtggagatcaaacgtacggtggctgcaccatctgtcttcatcttcccgccatctgatgagcagttgaaatctggaactgcctctgttgtgtgcctgctgaataacttctatcccagagaggccaaagtacagtggaaggtggataacgccctccaatcgggtaactcccaggagagtgtcacagagcaggacagcaaggacagcacctacagcctctgtagcaccctgacgctgagcaaagcagactacgagaaacacaaagtctacgcctgcgaagtcacccatcagggcctgagttcgcccgtcacaaagagcttcaacaggggagagtctggtggcggtggatctggaggcggaggtagtggtgggggaggttcagaagtgcagctggtggagagcggaggaggattggtgcagcctggaggaagcctgaagctgagctgcgctgctagcggatttacctttaacaaatatgccatgaactgggtgaggcaggcccccggaaaaggattggagtgggtggctaggattaggagcaagtacaacaactacgccacctactatgccgacagcgtgaaggaccgattcaccatctccagggacgacagcaaaaacaccgcctacctgcagatgaacaacctgaagaccgaggacaccgccgtgtactactgcgtgaggcacggcaacttcggcaactcctacatctcctactgggcctactggggccagggcaccctggtgaccgtgtcctccggtggcggagggtctggtggtggaggatccgggggaggaggttcaggaggcgggggaagtcagaccgtcgtgacccaggaaccctccctgaccgtgagccccggcggaacagtgaccctcacctgcggaagctccaccggagccgtgacctccggaaactaccccaactgggtccagcagaaacccggccaggcccccagaggcctgatcggaggaaccaagtttttggcccccggcacccccgccagattctccggatctttgctgggcgggaaagccgccctgactctgtccggcgtgcagcctgaggatgaggcagagtactactgtgtgctgtggtatagcaacagatgggtgttcggaggcggcaccaagctgaccgtcctgtgattctaga

SEQ ID NO: 1250 - DNA, 1575 bp, synthetic construct
  source 1..1575: mol_type = other DNA
gcggccgcaaactacaagacagacttgcaaaagaaggcatgcacagctcagcactgctctgttgcctggtcctcctgactggggtgagggcccaggtgcagctcgtgcagagcggcgctgaagtcaagaagcctggagcctccgtcaaagtgtcctgcaaggcttctggctatacctttaccaactactggattaattgggtgaggcaggcccctggccagggtctggagtggatgggggatatctacccagggggggggatcaccaattatgcccagaagtttcagggccgagtgacaatgaccagagacactagtattagtaccgcatacatggagctgagcagcctgcgatccgaggacacagccgtgtactactgcgccagaagttacggtaagtactttgattattggggccagggcactttggtgactgtctcatccgcttctaccaaaggaccccaggttcagctcgtccagagcggagcagaggtcaaaaagcccggcgcctccgtgaaggtgtcctgcaaggcctccggctacaccttcaccaactactggatcaactgggtgaggcaggcccccggccagggcctggagtggatgggcgacatctaccccggcggcggcatcaccaactacgcccagaagttccagggcagggtgaccatgaccagggacacctccatctccaccgcctacatggagctgtcctccctgaggtccgaggacaccgccgtgtactactgcgccaggtcctacggcaagtacttcgactactggggccagggcaccctggtgaccgtgtcctccgctagcaccaaaggaccctccgtgtttcccctggccccctcttccaagtccacctccggcggaaccgccgctctgggatgtctggtgaaagattattttcccgagcccgtgaccgtgtcttggaacagcggagccctgacctccggcgtgcacacatgtcccgccgtgctgcagtctagtggcctgtattctctgtcctccgtggtgaccgtgccttcctcttccctgggcacccagacctacatctgtaacgtgaaccacaagccttccaacaccaaagtggataaaaaggtggagcccaagagctctgacaagacccacaccggtggcggagggtctggtggtggaggatccgggggaggaggttcaggaggcgggggaagtgaagtgcagctggtggagagcggaggaggattggtgcagcctggaaactccctgaggctgtcctgcgctgctagcggatttaccttttcctcctttggaatgtcctgggtgaggcaggcccccggaaaaggattggagtgggtgagctccatttccggcagtggctccgacacactctacgctgattccgtgaagggccggttcaccatctccagggacaacgctaaaacaaccctgtacctgcagatgaactccttgaggcccgaggacaccgctgtgtattactgtaccatcggcggaagcctgtctaggagctctcagggaaccctcgtgaccgtgtcctccggaggacatcatcatcatcaccattgattctaga

SEQ ID NO: 1251 - DNA, 1602 bp, synthetic construct
  source 1..1602: mol_type = other DNA
gcggccgcaaactacaagacagacttgcaaaagaaggcatgcacagctcagcactgctctgttgcctggtcctcctgactggggtgagggcccaggtgcagctcgtgcagagcggcgctgaagtcaagaagcctggagcctccgtcaaagtgtcctgcaaggcttctggctatacctttaccaactactggattaattgggtgaggcaggcccctggccagggtctggagtggatgggggatatctacccagggggggggatcaccaattatgcccagaagtttcagggccgagtgacaatgaccagagacactagtattagtaccgcatacatggagctgagcagcctgcgatccgaggacacagccgtgtactactgcgccagaagttacggtaagtactttgattattggggccagggcactttggtgactgtctcatccggtggtggcggatcaggtgggggaggctctggtggaggcggtagtcaggttcagctcgtccagagcggagcagaggtcaaaaagcccggcgcctccgtgaaggtgtcctgcaaggcctccggctacaccttcaccaactactggatcaactgggtgaggcaggcccccggccagggcctggagtggatgggcgacatctaccccggcggcggcatcaccaactacgcccagaagttccagggcagggtgaccatgaccagggacacctccatctccaccgcctacatggagctgtcctccctgaggtccgaggacaccgccgtgtactactgcgccaggtcctacggcaagtacttcgactactggggccagggcaccctggtgaccgtgtcctccgctagcaccaaaggaccctccgtgtttcccctggccccctcttccaagtccacctccggcggaaccgccgctctgggatgtctggtgaaagattattttcccgagcccgtgaccgtgtcttggaacagcggagccctgacctccggcgtgcacacatgtcccgccgtgctgcagtctagtggcctgtattctctgtcctccgtggtgaccgtgccttcctcttccctgggcacccagacctacatctgtaacgtgaaccacaagccttccaacaccaaagtggataaaaaggtggagcccaagagctctgacaagacccacaccggtggcggagggtctggtggtggaggatccgggggaggaggttcaggaggcgggggaagtgaagtgcagctggtggagagcggaggaggattggtgcagcctggaaactccctgaggctgtcctgcgctgctagcggatttaccttttcctcctttggaatgtcctgggtgaggcaggcccccggaaaaggattggagtgggtgagctccatttccggcagtggctccgacacactctacgctgattccgtgaagggccggttcaccatctccagggacaacgctaaaacaaccctgtacctgcagatgaactccttgaggcccgaggacaccgctgtgtattactgtaccatcggcggaagcctgtctaggagctctcagggaaccctcgtgaccgtgtcctccggaggacatcatcatcatcaccattgattctaga

SEQ ID NO: 1252 - DNA, 1917 bp, synthetic construct
  source 1..1917: mol_type = other DNA
gcggccgcaaactacaagacagacttgcaaaagaaggcatgcacagctcagcactgctctgttgcctggtcctcctgactggggtgagggccgatatccagatgacccagtcccctagcagcctgagcgccagcgtgggcgatagggtgaccatcacctgtaaagcctcccaggacatcaagagctacctgacatggtaccagcagaagcctggaaaggctccaaagctcctgatttattattcaacaaggctggccgacggtgttccttctcgtttctccggctcagggtctggaaccgacttcaccctgactatctcaagtctgcagcccgaagattttgctacctactattgtctgcagcacgacgagagtccattcaccttcggcggtggcaccaaagtcgaaattaagggtggtggcggatcaggtgggggaggctctggtggaggcggtagtgatatccagatgacccagtccccctcctccctgtctgcttctgtgggagaccgcgtgaccattacctgtaaagctagccaggacatcaagtcctacctgacctggtaccagcagaagcccggcaaggctccaaaactgctcatctactactccacccggctggctgacggcgttccttctaggttctccggcagcggaagcggaaccgatttcaccctcaccatctcctccctgcagcccgaagacttcgccacatactactgcctgcagcacgacgaaagtcccttcacctttggcggcggtaccaaagtggagatcaaacgtacggtggctgcaccatctgtcttcatcttcccgccatctgatgagcagttgaaatctggaactgcctctgttgtgtgcctgctgaataacttctatcccagagaggccaaagtacagtggaaggtggataacgccctccaatcgggtaactcccaggagagtgtcacagagcaggacagcaaggacagcacctacagcctctgtagcaccctgacgctgagcaaagcagactacgagaaacacaaagtctacgcctgcgaagtcacccatcagggcctgagttcgcccgtcacaaagagcttcaacaggggagagtctggtggcggtggatctggaggcggaggtagtggtgggggaggttcagaagtgcagctggtggagagcggaggaggattggtgcagcctggaggaagcctgaagctgagctgcgctgctagcggatttacctttaacaaatatgccatgaactgggtgaggcaggcccccggaaaaggattggagtgggtggctaggattaggagcaagtacaacaactacgccacctactatgccgacagcgtgaaggaccgattcaccatctccagggacgacagcaaaaacaccgcctacctgcagatgaacaacctgaagaccgaggacaccgccgtgtactactgcgtgaggcacggcaacttcggcaactcctacatctcctactgggcctactggggccagggcaccctggtgaccgtgtcctccggtggcggagggtctggtggtggaggatccgggggaggaggttcaggaggcgggggaagtcagaccgtcgtgacccaggaaccctccctgaccgtgagccccggcggaacagtgaccctcacctgcggaagctccaccggagccgtgacctccggaaactaccccaactgggtccagcagaaacccggccaggcccccagaggcctgatcggaggaaccaagtttttggcccccggcacccccgccagattctccggatctttgctgggcgggaaagccgccctgactctgtccggcgtgcagcctgaggatgaggcagagtactactgtgtgctgtggtatagcaacagatgggtgttcggaggcggcaccaagctgaccgtcctgtgattctaga

SEQ ID NO: 1253 - DNA, 1773 bp, synthetic construct
  source 1..1773: mol_type = other DNA
gcggccgcaaactacaagacagacttgcaaaagaaggcatgcacagctcagcactgctctgttgcctggtcctcctgactggggtgagggccgaagtgtatctggtggagtccggaggcggactggtgcagcctggaggatctgtgaagctgagctgcagcgcaagcggatttacctttagtacctttcccatggcctgggtgaggcaggctcctacacagggactgcagtgggtggctactctgtcccctagcggagactccacctactacagggactctgtgaagggccggttcaccatctctcgcgacaacgtgctgaacaccctgtacctgcacatggacatcctgcggtccgaagatactgctacctactactgcacaaaagtcggatttaccaccttctacttcgactcctggggccagggagtgatggtggctgtgtctagcgctaaaacaacagccccatcggtctatccactggcccctgtgtctggagatacaactggctcctcggtgactctaggatgcctggtcaagggttatttccctgagccagtgaccttgacctggaactctggttctctgtccagtggtgtgcacacctgtccagctgtcctgcagtctgacctctacaccctcagcagctcagtgactgtaacctcgagcacctggcccagccagtccatcacctgcaatgtggcccacccggcaagcagcaccaaggtggacaagaaaattgagcccaagtcctccgacaaaacccacactggtggtggcggatcaggtgggggaggctctggtggaggcggtagtacacacgacctgccaaaagccgtcgtcaaactggaaccaccctggattcaagtcctgaaagaagatactgttaccctgacctgcgagggcacccacaaccctggaaactcctccacccagtggttccacaacggaagaagtatcagatcccaggtccaggcctcctacaccttcaaggccacagtgaatgactccggcgagtacagatgccagatggagcagaccaggctgtccgaccctgtggatctgggagtgatcagcgactggctgctgctgcagacccctcagctggtgtttctggagggcgagacaatcacactgaggtgccactcctggaggaacaaactgctgaaccgcatctccttctttcataacgagaagtccgtgaggtaccaccactactcctccaacttctctattcctaaagccaaccactcccactccggcgactactactgcaagggctccctgggaaggaccctgcatcagtctaagcccgtcaccatcaccgtccagggccctaaatcctcccgcggtggcggtggatctggaggcggaggtagtggtgggggaggttcacaggtgcagctgcaggaaagtggcggaggactggtgcagccaggaggatctctgaggctgtcctgcgaggcttccggattcacattttccaggtttggtatgacatgggtgcggcaggcccccggaaaaggagtggaatgggtgtctggcatttcttccctgggagactccacactgtacgccgactctgtgaagggcaggttcaccatcagcagggacaacgccaagaacacactgtacctgcagatgaatagcctgaagcccgaggacaccgccgtgtattattgcaccatcggcggatcactgaatccaggcggccagggaacccaggtgacagtgtctagcggcggacaccatcaccatcatcactgattctaga

SEQ ID NO: 1254 - DNA, 1320 bp, synthetic construct
  source 1..1320: mol_type = other DNA
gcggccgcaaactacaagacagacttgcaaaagaaggcatgcacagctcagcactgctctgttgcctggtcctcctgactggggtgagggccgatatccagatgacccagtccccctccttcctgtccgcttctgtgggagacagagtcaccatcaactgtaaggcctcccagaacattaacaagtacctggactggtaccagcagaagtttggcgagacacccaagctgctgatctacaacatcaataacctgcactccggcgtcccctccaggttttcaggaagcggaagcggacccgacttcaccctgactatctcctccctgcagcccgaagatgttgctacctacttctgcctgcagcaccgcaccggatggacattcggtggtggaaccaaagtcgaactgaggagagcagatgctgcaccaactgtatccatcttcccaccatccagtgagcagttaacatctggaggtgcctcagtcgtgtgcttcttgaacaacttctaccccaaagacatcaatgtcaagtggaagattgatggcagtgaacgacaaaatggcgtcctgaacagttggactgatcaggacagcaaagacagcacctacagcatgtgtagcaccctcacgttgaccaaggacgagtatgaacgacataacagctatacctgtgaggccactcacaagacatcaacttcacccattgtcaagagcttcaacaggaatgagtctggtggtggcggatcaggtgggggaggctctggtggaggcggtagtacacacgacctgccaaaagccgtcgtcaaactggaaccaccctggattcaagtcctgaaagaagatactgttaccctgacctgcgagggcacccacaaccctggaaactcctccacccagtggttccacaacggaagaagtatcagatcccaggtccaggcctcctacaccttcaaggccacagtgaatgactccggcgagtacagatgccagatggagcagaccaggctgtccgaccctgtggatctgggagtgatcagcgactggctgctgctgcagacccctcagctggtgtttctggagggcgagacaatcacactgaggtgccactcctggaggaacaaactgctgaaccgcatctccttctttcataacgagaagtccgtgaggtaccaccactactcctccaacttctctattcctaaagccaaccactcccactccggcgactactactgcaagggctccctgggaaggaccctgcatcagtctaagcccgtcaccatcaccgtccagggccctaaatcctcccgctgattctaga

SEQ ID NO: 1255 - DNA, 1614 bp, synthetic construct
  source 1..1614: mol_type = other DNA
gcggccgcaaactacaagacagacttgcaaaagaaggcatgcacagctcagcactgctctgttgcctggtcctcctgactggggtgagggccgaagtgtatctggtggagtccggaggcggactggtgcagcctggaggatctgtgaagctgagctgcagcgcaagcggatttacctttagtacctttcccatggcctgggtgaggcaggctcctacacagggactgcagtgggtggctactctgtcccctagcggagactccacctactacagggactctgtgaagggccggttcaccatctctcgcgacaacgtgctgaacaccctgtacctgcacatggacatcctgcggtccgaagatactgctacctactactgcacaaaagtcggatttaccaccttctacttcgactcctggggccagggagtgatggtggctgtgtctagcgctaaaacaacagccccatcggtctatccactggcccctgtgtctggagatacaactggctcctcggtgactctaggatgcctggtcaagggttatttccctgagccagtgaccttgacctggaactctggttctctgtccagtggtgtgcacacctgtccagctgtcctgcagtctgacctctacaccctcagcagctcagtgactgtaacctcgagcacctggcccagccagtccatcacctgcaatgtggcccacccggcaagcagcaccaaggtggacaagaaaattgagcccaagtcctccgacaaaacccacactggtggtggcggatcaggtgggggaggctctggtggaggcggtagtcaggtgcagctgcaggaaagtggcggaggactggtgcaggctggaggatctctgaggctgtcctgcgcagcttccggaagagctgtcggaaactacatcatcggctggtttaggcaggcccccggaaaagaaagggaatttgtggctactaccacaagggacgggggctctacattctacgccgactccgtcaagggcaggttcaccatcagcagggacaacgccaagaacaccgtgaacctgcagatgaactccctggagcccgaggacaccgcagtgtattattgcgccgccaagtcttggtccgtgccactgaggcctaccagcgctgatttcgactcctggggccagggtacccaggtgacagtgtctagtggtggcggtggatctggaggcggaggtagtggtgggggaggttcacaggtgcagctgcaggaaagtggcggaggactggtgcagccaggaggatctctgaggctgtcctgcgaggcttccggattcacattttccaggtttggtatgacatgggtgcggcaggcccccggaaaaggagtggaatgggtgtctggcatttcttccctgggagactccacactgtacgccgactctgtgaagggcaggttcaccatcagcagggacaacgccaagaacacactgtacctgcagatgaatagcctgaagcccgaggacaccgccgtgtattattgcaccatcggcggatcactgaatccaggcggccagggaacccaggtgacagtgtctagcggcggacaccatcaccatcatcactgattctaga

SEQ ID NO: 1256 - DNA, 1161 bp, synthetic construct
  source 1..1161: mol_type = other DNA
gcggccgcaaactacaagacagacttgcaaaagaaggcatgcacagctcagcactgctctgttgcctggtcctcctgactggggtgagggccgatatccagatgacccagtccccctccttcctgtccgcttctgtgggagacagagtcaccatcaactgtaaggcctcccagaacattaacaagtacctggactggtaccagcagaagtttggcgagacacccaagctgctgatctacaacatcaataacctgcactccggcgtcccctccaggttttcaggaagcggaagcggacccgacttcaccctgactatctcctccctgcagcccgaagatgttgctacctacttctgcctgcagcaccgcaccggatggacattcggtggtggaaccaaagtcgaactgaggagagcagatgctgcaccaactgtatccatcttcccaccatccagtgagcagttaacatctggaggtgcctcagtcgtgtgcttcttgaacaacttctaccccaaagacatcaatgtcaagtggaagattgatggcagtgaacgacaaaatggcgtcctgaacagttggactgatcaggacagcaaagacagcacctacagcatgtgtagcaccctcacgttgaccaaggacgagtatgaacgacataacagctatacctgtgaggccactcacaagacatcaacttcacccattgtcaagagcttcaacaggaatgagtctggtggtggcggatcaggtgggggaggctctggtggaggcggtagtcaggtgcagctgcaggaaagtggcggaggactggtgcaggctggaggatctctgaggctgtcctgcgcagcttccggaagagctgtcggaaactacatcatcggctggtttaggcaggcccccggaaaagaaagggaatttgtggctactaccacaagggacgggggctctacattctacgccgactccgtcaagggcaggttcaccatcagcagggacaacgccaagaacaccgtgaacctgcagatgaactccctggagcccgaggacaccgcagtgtattattgcgccgccaagtcttggtccgtgccactgaggcctaccagcgctgatttcgactcctggggccagggtacccaggtgacagtgtctagttgattctaga

SEQ ID NO: 1257 - DNA, 1764 bp, synthetic construct
  source 1..1764: mol_type = other DNA
gcggccgcaaactacaagacagacttgcaaaagaaggcatgcacagctcagcactgctctgttgcctggtcctcctgactggggtgagggccgaagtgcagctggtggagagcggaggaggactggtgcagcctggaaagtccctgaagctgtcctgcgaggcaagcggatttacctttagcggatacggaatgcactgggtgaggcaggcacccggaagaggactggaaagcgtggcttacattacctccagcagcatcaacatcaaatacgccgacgccgtgaagggccggttcacagtgtctagggacaacgctaagaacctgctgtttctgcagatgaacatcctgaagagtgaggacaccgccatgtactactgcgccaggttcgattgggataagaactactggggccagggaaccatggtgaccgtgagttccgctaaaacaacagccccatcggtctatccactggcccctgtgtctggagatacaactggctcctcggtgactctaggatgcctggtcaagggttatttccctgagccagtgaccttgacctggaactctggttctctgtccagtggtgtgcacacctgtccagctgtcctgcagtctgacctctacaccctcagcagctcagtgactgtaacctcgagcacctggcccagccagtccatcacctgcaatgtggcccacccggcaagcagcaccaaggtggacaagaaaattgaacccaagtccagcgacaaaacacacacaggtggtggcggatcaggtgggggaggctctggtggaggcggtagtacacacgacctgccaaaagccgtcgtcaaactggaaccaccctggattcaagtcctgaaagaagatactgttaccctgacctgcgagggcacccacaaccctggaaactcctccacccagtggttccacaacggaagaagtatcagatcccaggtccaggcctcctacaccttcaaggccacagtgaatgactccggcgagtacagatgccagatggagcagaccaggctgtccgaccctgtggatctgggagtgatcagcgactggctgctgctgcagacccctcagctggtgtttctggagggcgagacaatcacactgaggtgccactcctggaggaacaaactgctgaaccgcatctccttctttcataacgagaagtccgtgaggtaccaccactactcctccaacttctctattcctaaagccaaccactcccactccggcgactactactgcaagggctccctgggaaggaccctgcatcagtctaagcccgtcaccatcaccgtccagggccctaaatcctcccgcggtggcggtggatctggaggcggaggtagtggtgggggaggttcacaggtgcagctgcaggaaagtggcggaggactggtgcagccaggaggatctctgaggctgtcctgcgaggcttccggattcacattttccaggtttggtatgacatgggtgcggcaggcccccggaaaaggagtggaatgggtgtctggcatttcttccctgggagactccacactgtacgccgactctgtgaagggcaggttcaccatcagcagggacaacgccaagaacacactgtacctgcagatgaatagcctgaagcccgaggacaccgccgtgtattattgcaccatcggcggatcactgaatccaggcggccagggaacccaggtgacagtgtctagcggcggacaccatcaccatcatcactgattctaga

SEQ ID NO: 1258 - DNA, 1323 bp, synthetic construct
  source 1..1323: mol_type = other DNA
gcggccgcaaactacaagacagacttgcaaaagaaggcatgcacagctcagcactgctctgttgcctggtcctcctgactggggtgagggccgatatccagatgacccagtccccctcctccctgcctgcttctctgggagatagagtgaccattaactgtcaggcctcccaggacatctccaactacctgaactggtaccagcagaaacccggcaaagcccccaaactgctgatctactacaccaataagctggccgacggagtgccctcccgattttcaggaagcggctcaggcagggactcctctttcaccatctcctccctggaatccgaggacatcggctcttactactgccagcagtactacaactacccctggaccttcggccccggtactaagctggagatcaagagagcagatgctgcaccaactgtatccatcttcccaccatccagtgagcagttaacatctggaggtgcctcagtcgtgtgcttcttgaacaacttctaccccaaagacatcaatgtcaagtggaagattgatggcagtgaacgacaaaatggcgtcctgaacagttggactgatcaggacagcaaagacagcacctacagcatgtgtagcaccctcacgttgaccaaggacgagtatgaacgacataacagctatacctgtgaggccactcacaagacatcaacttcacccattgtcaagagcttcaacaggaatgagtctggtggtggcggatcaggtgggggaggctctggtggaggcggtagtacacacgacctgccaaaagccgtcgtcaaactggaaccaccctggattcaagtcctgaaagaagatactgttaccctgacctgcgagggcacccacaaccctggaaactcctccacccagtggttccacaacggaagaagtatcagatcccaggtccaggcctcctacaccttcaaggccacagtgaatgactccggcgagtacagatgccagatggagcagaccaggctgtccgaccctgtggatctgggagtgatcagcgactggctgctgctgcagacccctcagctggtgtttctggagggcgagacaatcacactgaggtgccactcctggaggaacaaactgctgaaccgcatctccttctttcataacgagaagtccgtgaggtaccaccactactcctccaacttctctattcctaaagccaaccactcccactccggcgactactactgcaagggctccctgggaaggaccctgcatcagtctaagcccgtcaccatcaccgtccagggccctaaatcctcccgctgattctaga

SEQ ID NO: 1259 - DNA, 1773 bp, synthetic construct
  source 1..1773: mol_type = other DNA
gcggccgcaaactacaagacagacttgcaaaagaaggcatgcacagctcagcactgctctgttgcctggtcctcctgactggggtgagggcccaggtgcagctggtgcagagtggagcagaggtgaaaaagcccggctcctccgtgaaggtgtcctgcaaggcctccggctactccatcacctccggctaccactggggctggatcaggcaggcccccggccagggcctggagtggatcggcgccatctaccactccggctccacctactactccccctccctgaagtccagggtgaccatcaccgccgacaagtccacctccaccgcctacatggagctgtcctccctgaggtccgaggacaccgccgtgtactactgcgccaggggccccctgtcctactacgccttcgactactggggccagggcaccctggtgaccgtgtcctccgctaaaacaacagccccatcggtctatccactggcccctgtgtctggagatacaactggctcctcggtgactctaggatgcctggtcaagggttatttccctgagccagtgaccttgacctggaactctggttctctgtccagtggtgtgcacacctgtccagctgtcctgcagtctgacctctacaccctcagcagctcagtgactgtaacctcgagcacctggcccagccagtccatcacctgcaatgtggcccacccggcaagcagcaccaaggtggacaagaaaattgagcccaagtcctccgacaagacccacaccggtggtggcggatcaggtgggggaggctctggtggaggcggtagtacacacgacctgccaaaagccgtcgtcaaactggaaccaccctggattcaagtcctgaaagaagatactgttaccctgacctgcgagggcacccacaaccctggaaactcctccacccagtggttccacaacggaagaagtatcagatcccaggtccaggcctcctacaccttcaaggccacagtgaatgactccggcgagtacagatgccagatggagcagaccaggctgtccgaccctgtggatctgggagtgatcagcgactggctgctgctgcagacccctcagctggtgtttctggagggcgagacaatcacactgaggtgccactcctggaggaacaaactgctgaaccgcatctccttctttcataacgagaagtccgtgaggtaccaccactactcctccaacttctctattcctaaagccaaccactcccactccggcgactactactgcaagggctccctgggaaggaccctgcatcagtctaagcccgtcaccatcaccgtccagggccctaaatcctcccgcggtggcggtggatctggaggcggaggtagtggtgggggaggttcacaggtgcagctgcaggaaagtggcggaggactggtgcagccaggaggatctctgaggctgtcctgcgaggcttccggattcacattttccaggtttggtatgacatgggtgcggcaggcccccggaaaaggagtggaatgggtgtctggcatttcttccctgggagactccacactgtacgccgactctgtgaagggcaggttcaccatcagcagggacaacgccaagaacacactgtacctgcagatgaatagcctgaagcccgaggacaccgccgtgtattattgcaccatcggcggatcactgaatccaggcggccagggaacccaggtgacagtgtctagcggcggacaccatcaccatcatcactgattctaga

SEQ ID NO: 1260 - DNA, 1323 bp, synthetic construct
  source 1..1323: mol_type = other DNA
gcggccgcaaactacaagacagacttgcaaaagaaggcatgcacagctcagcactgctctgttgcctggtcctcctgactggggtgagggccgatatccagctgacccagagcccctcctccctgtctgcttctgtgggagacagggtgaccattacctgccgggcttcccagtccgtgtccagatacctggcctggtaccagcagaagcccggaaaagcccccaagctgctgatctacgacgcctctaacagggcaaccggaatcccctccagattctccggctccggaagcggaaccgacttcacactgactatctcctccctgcagcctgaggatttcgccacctactactgccagcagtactacaggagtcccatcaccttcggccagggcacaaaggtggaaatcaaaagagcagatgctgcaccaactgtatccatcttcccaccatccagtgagcagttaacatctggaggtgcctcagtcgtgtgcttcttgaacaacttctaccccaaagacatcaatgtcaagtggaagattgatggcagtgaacgacaaaatggcgtcctgaacagttggactgatcaggacagcaaagacagcacctacagcatgtgtagcaccctcacgttgaccaaggacgagtatgaacgacataacagctatacctgtgaggccactcacaagacatcaacttcacccattgtcaagagcttcaacaggaatgagtctggtggtggcggatcaggtgggggaggctctggtggaggcggtagtacacacgacctgccaaaagccgtcgtcaaactggaaccaccctggattcaagtcctgaaagaagatactgttaccctgacctgcgagggcacccacaaccctggaaactcctccacccagtggttccacaacggaagaagtatcagatcccaggtccaggcctcctacaccttcaaggccacagtgaatgactccggcgagtacagatgccagatggagcagaccaggctgtccgaccctgtggatctgggagtgatcagcgactggctgctgctgcagacccctcagctggtgtttctggagggcgagacaatcacactgaggtgccactcctggaggaacaaactgctgaaccgcatctccttctttcataacgagaagtccgtgaggtaccaccactactcctccaacttctctattcctaaagccaaccactcccactccggcgactactactgcaagggctccctgggaaggaccctgcatcagtctaagcccgtcaccatcaccgtccagggccctaaatcctcccgctgattctaga

SEQ ID NO: 1261 - DNA, 1995 bp, synthetic construct
  source 1..1995: mol_type = other DNA
gcggccgcaaactacaagacagacttgcaaaagaaggcatgcacagctcagcactgctctgttgcctggtcctcctgactggggtgagggccacacacgacctgccaaaagccgtcgtcaaactggaaccaccctggattcaagtcctgaaagaagatactgttaccctgacctgcgagggcacccacaaccctggaaactcctccacccagtggttccacaacggaagaagtatcagatcccaggtccaggcctcctacaccttcaaggccacagtgaatgactccggcgagtacagatgccagatggagcagaccaggctgtccgaccctgtggatctgggagtgatcagcgactggctgctgctgcagacccctcagctggtgtttctggagggcgagacaatcacactgaggtgccactcctggaggaacaaactgctgaaccgcatctccttctttcataacgagaagtccgtgaggtaccaccactactcctccaacttctctattcctaaagccaaccactcccactccggcgactactactgcaagggctccctgggaaggaccctgcatcagtctaagcccgtcaccatcaccgtccagggccctaaatcctcccgcggtggtggcggatcaggtgggggaggctctggtggaggcggtagtgatatccagatgacccagtccccctcctccctgtctgcttctgtgggagacagagtgaccattacctgtagagcctcccagcccatcggccataccctgggatggtaccagcagaagcccggaaaagcccccaaactgctgatctactgggcctctgacctgatcaggggagtgccaagccggttctccggatctggaagcggaacagacttcaccctgactatctcctccctgcagcctgaggatttcgccacctattactgccagcagatgctgcgcaccccattcatgttcggacagggcaccaaggtggagatcaagggtggcggtggatctggaggcggaggtagtggtgggggaggttcaacacacgacctgccaaaagccgtcgtcaaactggaaccaccctggattcaagtcctgaaagaagatactgttaccctgacctgcgagggcacccacaaccctggaaactcctccacccagtggttccacaacggaagaagtatcagatcccaggtccaggcctcctacaccttcaaggccacagtgaatgactccggcgagtacagatgccagatggagcagaccaggctgtccgaccctgtggatctgggagtgatcagcgactggctgctgctgcagacccctcagctggtgtttctggagggcgagacaatcacactgaggtgccactcctggaggaacaaactgctgaaccgcatctccttctttcataacgagaagtccgtgaggtaccaccactactcctccaacttctctattcctaaagccaaccactcccactccggcgactactactgcaagggctccctgggaaggaccctgcatcagtctaagcccgtcaccatcaccgtccagggccctaaatcctcccgcggaggcggtggaagtggcggaggagggtcagggggaggtggatctcaggtgcagctgcaggaaagtggcggaggactggtgcagccaggaggatctctgaggctgtcctgcgaggcttccggattcacattttccaggtttggtatgacatgggtgcggcaggcccccggaaaaggagtggaatgggtgtctggcatttcttccctgggagactccacactgtacgccgactctgtgaagggcaggttcaccatcagcagggacaacgccaagaacacactgtacctgcagatgaatagcctgaagcccgaggacaccgccgtgtattattgcaccatcggcggatcactgaatccaggcggccagggaacccaggtgacagtgtctagcggcggacaccatcaccatcatcactgattctaga

SEQ ID NO: 1262 - DNA, 1776 bp, synthetic construct
  source 1..1776: mol_type = other DNA
gcggccgcaaactacaagacagacttgcaaaagaaggcatgcacagctcagcactgctctgttgcctggtcctcctgactggggtgagggccgatgtgcagctggtggagtccggaggaggactggtgcagcctggaagaagcctgaagctgtcctgtgccgcctccggatttattttttcctactttgacatggcctgggtgaggcaggctcccacaaaaggactggagtgggtggcttccatttcccccgatggatctatcccctattaccgggactccgtgaagggccgattcaccgtgtcccgagagaatgccaagagcagcctgtacctgcagatggattccctgaggtctgaggacaccgccacctactactgtgctaggaggagctatggcggatacagtgagatcgactattggggccagggcgtgatggtgaccgtgtctagtgctaaaacaacagccccatcggtctatccactggcccctgtgtctggagatacaactggctcctcggtgactctaggatgcctggtcaagggttatttccctgagccagtgaccttgacctggaactctggttctctgtccagtggtgtgcacacctgtccagctgtcctgcagtctgacctctacaccctcagcagctcagtgactgtaacctcgagcacctggcccagccagtccatcacctgcaatgtggcccacccggcaagcagcaccaaggtggacaagaaaattgagccaaagtcctccgacaagacacatacaggtggtggcggatcaggtgggggaggctctggtggaggcggtagtacacacgacctgccaaaagccgtcgtcaaactggaaccaccctggattcaagtcctgaaagaagatactgttaccctgacctgcgagggcacccacaaccctggaaactcctccacccagtggttccacaacggaagaagtatcagatcccaggtccaggcctcctacaccttcaaggccacagtgaatgactccggcgagtacagatgccagatggagcagaccaggctgtccgaccctgtggatctgggagtgatcagcgactggctgctgctgcagacccctcagctggtgtttctggagggcgagacaatcacactgaggtgccactcctggaggaacaaactgctgaaccgcatctccttctttcataacgagaagtccgtgaggtaccaccactactcctccaacttctctattcctaaagccaaccactcccactccggcgactactactgcaagggctccctgggaaggaccctgcatcagtctaagcccgtcaccatcaccgtccagggccctaaatcctcccgcggtggcggtggatctggaggcggaggtagtggtgggggaggttcacaggtgcagctgcaggaaagtggcggaggactggtgcagccaggaggatctctgaggctgtcctgcgaggcttccggattcacattttccaggtttggtatgacatgggtgcggcaggcccccggaaaaggagtggaatgggtgtctggcatttcttccctgggagactccacactgtacgccgactctgtgaagggcaggttcaccatcagcagggacaacgccaagaacacactgtacctgcagatgaatagcctgaagcccgaggacaccgccgtgtattattgcaccatcggcggatcactgaatccaggcggccagggaacccaggtgacagtgtctagcggcggacaccatcaccatcatcactgattctaga

SEQ ID NO: 1263 - DNA, 1323 bp, synthetic construct
  source 1..1323: mol_type = other DNA
gcggccgcaaactacaagacagacttgcaaaagaaggcatgcacagctcagcactgctctgttgcctggtcctcctgactggggtgagggccgatatccagatgacccagtcccccgcctccctgtctgcttctctggaagagattgtgaccattacctgtcaggcctcccaggacattggcaactggctggcttggtaccaccagaagcccggaaagtccccccagctgctgatctacggctccacatccctggccgacggagtgccttctcgattttccggctcctcctccggctcccagtactctctgaagatctccagactgcaggtggaggacatcggcatctactactgcctgcaggcctacggcgccccttggacatttggtggaggcactaagctggagctgaaaagagcagatgctgcaccaactgtatccatcttcccaccatccagtgagcagttaacatctggaggtgcctcagtcgtgtgcttcttgaacaacttctaccccaaagacatcaatgtcaagtggaagattgatggcagtgaacgacaaaatggcgtcctgaacagttggactgatcaggacagcaaagacagcacctacagcatgtgtagcaccctcacgttgaccaaggacgagtatgaacgacataacagctatacctgtgaggccactcacaagacatcaacttcacccattgtcaagagcttcaacaggaatgagtctggtggtggcggatcaggtgggggaggctctggtggaggcggtagtacacacgacctgccaaaagccgtcgtcaaactggaaccaccctggattcaagtcctgaaagaagatactgttaccctgacctgcgagggcacccacaaccctggaaactcctccacccagtggttccacaacggaagaagtatcagatcccaggtccaggcctcctacaccttcaaggccacagtgaatgactccggcgagtacagatgccagatggagcagaccaggctgtccgaccctgtggatctgggagtgatcagcgactggctgctgctgcagacccctcagctggtgtttctggagggcgagacaatcacactgaggtgccactcctggaggaacaaactgctgaaccgcatctccttctttcataacgagaagtccgtgaggtaccaccactactcctccaacttctctattcctaaagccaaccactcccactccggcgactactactgcaagggctccctgggaaggaccctgcatcagtctaagcccgtcaccatcaccgtccagggccctaaatcctcccgctgattctaga

SEQ ID NO: 1264 - DNA, 1617 bp, synthetic construct
  source 1..1617: mol_type = other DNA
gcggccgcaaactacaagacagacttgcaaaagaaggcatgcacagctcagcactgctctgttgcctggtcctcctgactggggtgagggccgatgtgcagctggtggagtccggaggaggactggtgcagcctggaagaagcctgaagctgtcctgtgccgcctccggatttattttttcctactttgacatggcctgggtgaggcaggctcccacaaaaggactggagtgggtggcttccatttcccccgatggatctatcccctattaccgggactccgtgaagggccgattcaccgtgtcccgagagaatgccaagagcagcctgtacctgcagatggattccctgaggtctgaggacaccgccacctactactgtgctaggaggagctatggcggatacagtgagatcgactattggggccagggcgtgatggtgaccgtgtctagtgctaaaacaacagccccatcggtctatccactggcccctgtgtctggagatacaactggctcctcggtgactctaggatgcctggtcaagggttatttccctgagccagtgaccttgacctggaactctggttctctgtccagtggtgtgcacacctgtccagctgtcctgcagtctgacctctacaccctcagcagctcagtgactgtaacctcgagcacctggcccagccagtccatcacctgcaatgtggcccacccggcaagcagcaccaaggtggacaagaaaattgagccaaagtcctccgacaagacacatacaggtggtggcggatcaggtgggggaggctctggtggaggcggtagtcaggtgcagctgcaggaaagtggcggaggactggtgcaggctggaggatctctgaggctgtcctgcgcagcttccggaagagctgtcggaaactacatcatcggctggtttaggcaggcccccggaaaagaaagggaatttgtggctactaccacaagggacgggggctctacattctacgccgactccgtcaagggcaggttcaccatcagcagggacaacgccaagaacaccgtgaacctgcagatgaactccctggagcccgaggacaccgcagtgtattattgcgccgccaagtcttggtccgtgccactgaggcctaccagcgctgatttcgactcctggggccagggtacccaggtgacagtgtctagtggtggcggtggatctggaggcggaggtagtggtgggggaggttcacaggtgcagctgcaggaaagtggcggaggactggtgcagccaggaggatctctgaggctgtcctgcgaggcttccggattcacattttccaggtttggtatgacatgggtgcggcaggcccccggaaaaggagtggaatgggtgtctggcatttcttccctgggagactccacactgtacgccgactctgtgaagggcaggttcaccatcagcagggacaacgccaagaacacactgtacctgcagatgaatagcctgaagcccgaggacaccgccgtgtattattgcaccatcggcggatcactgaatccaggcggccagggaacccaggtgacagtgtctagcggcggacaccatcaccatcatcactgattctaga

SEQ ID NO: 1265 - DNA, 1164 bp, synthetic construct
  source 1..1164: mol_type = other DNA
gcggccgcaaactacaagacagacttgcaaaagaaggcatgcacagctcagcactgctctgttgcctggtcctcctgactggggtgagggccgatatccagatgacccagtcccccgcctccctgtctgcttctctggaagagattgtgaccattacctgtcaggcctcccaggacattggcaactggctggcttggtaccaccagaagcccggaaagtccccccagctgctgatctacggctccacatccctggccgacggagtgccttctcgattttccggctcctcctccggctcccagtactctctgaagatctccagactgcaggtggaggacatcggcatctactactgcctgcaggcctacggcgccccttggacatttggtggaggcactaagctggagctgaaaagagcagatgctgcaccaactgtatccatcttcccaccatccagtgagcagttaacatctggaggtgcctcagtcgtgtgcttcttgaacaacttctaccccaaagacatcaatgtcaagtggaagattgatggcagtgaacgacaaaatggcgtcctgaacagttggactgatcaggacagcaaagacagcacctacagcatgtgtagcaccctcacgttgaccaaggacgagtatgaacgacataacagctatacctgtgaggccactcacaagacatcaacttcacccattgtcaagagcttcaacaggaatgagtctggtggtggcggatcaggtgggggaggctctggtggaggcggtagtcaggtgcagctgcaggaaagtggcggaggactggtgcaggctggaggatctctgaggctgtcctgcgcagcttccggaagagctgtcggaaactacatcatcggctggtttaggcaggcccccggaaaagaaagggaatttgtggctactaccacaagggacgggggctctacattctacgccgactccgtcaagggcaggttcaccatcagcagggacaacgccaagaacaccgtgaacctgcagatgaactccctggagcccgaggacaccgcagtgtattattgcgccgccaagtcttggtccgtgccactgaggcctaccagcgctgatttcgactcctggggccagggtacccaggtgacagtgtctagttgattctaga

SEQ ID NO: 1266 - DNA, 1788 bp, synthetic construct
  source 1..1788: mol_type = other DNA
gcggccgcaaactacaagacagacttgcaaaagaaggcatgcacagctcagcactgctctgttgcctggtcctcctgactggggtgagggccgaaatgcagctggtggagagcgggggaggactggtgcagcctggaagatctatgaagctgtcctgcgccggcagcggattcacaatctccgactacggggtggcctgggtgagacaggctcctaaaaagggcctggagtgggtggcctacatctcctacgccggcggcaccacctactacagggagtccgtgaagggcaggttcaccatctccagggacaacgccaagtccaccctgtacctgcagatggactccctgaggtccgaggacaccgccacctactactgcaccatcgacggctacggcggctactccggctcccactggtacttcgacttctggggccccggcaccatggtgaccgtgtcctccgctaaaacaacagccccatcggtctatccactggcccctgtgtctggagatacaactggctcctcggtgactctaggatgcctggtcaagggttatttccctgagccagtgaccttgacctggaactctggttctctgtccagtggtgtgcacacctgtccagctgtcctgcagtctgacctctacaccctcagcagctcagtgactgtaacctcgagcacctggcccagccagtccatcacctgcaatgtggcccacccggcaagcagcaccaaggtggacaagaaaattgagcccaagtcctccgacaagacccacaccggtggtggcggatcaggtgggggaggctctggtggaggcggtagtacacacgacctgccaaaagccgtcgtcaaactggaaccaccctggattcaagtcctgaaagaagatactgttaccctgacctgcgagggcacccacaaccctggaaactcctccacccagtggttccacaacggaagaagtatcagatcccaggtccaggcctcctacaccttcaaggccacagtgaatgactccggcgagtacagatgccagatggagcagaccaggctgtccgaccctgtggatctgggagtgatcagcgactggctgctgctgcagacccctcagctggtgtttctggagggcgagacaatcacactgaggtgccactcctggaggaacaaactgctgaaccgcatctccttctttcataacgagaagtccgtgaggtaccaccactactcctccaacttctctattcctaaagccaaccactcccactccggcgactactactgcaagggctccctgggaaggaccctgcatcagtctaagcccgtcaccatcaccgtccagggccctaaatcctcccgcggtggcggtggatctggaggcggaggtagtggtgggggaggttcacaggtgcagctgcaggaaagtggcggaggactggtgcagccaggaggatctctgaggctgtcctgcgaggcttccggattcacattttccaggtttggtatgacatgggtgcggcaggcccccggaaaaggagtggaatgggtgtctggcatttcttccctgggagactccacactgtacgccgactctgtgaagggcaggttcaccatcagcagggacaacgccaagaacacactgtacctgcagatgaatagcctgaagcccgaggacaccgccgtgtattattgcaccatcggcggatcactgaatccaggcggccagggaacccaggtgacagtgtctagcggcggacaccatcaccatcatcactgattctaga

SEQ ID NO: 1267 - DNA, 1320 bp, synthetic construct
  source 1..1320: mol_type = other DNA
gcggccgcaaactacaagacagacttgcaaaagaaggcatgcacagctcagcactgctctgttgcctggtcctcctgactggggtgagggccgatatccagatgacccagtccccctccctgctgtctgcttctgtgggagacagagtgaccctgaactgtaggacctcccagaacgtgtacaagaacctggcctggtaccagcagcagctgggagaagctcccaagctgctgatctacaacgccaatagcctgcaggcaggcatcccctctaggttcagcggaagcggaagcggtaccgacttcaccctgaccatctcctccctgcagcccgaagatgtcgccacatacttctgccagcagtactactccggcaacacattcggcgccggcactaacctggaactgaagagagcagatgctgcaccaactgtatccatcttcccaccatccagtgagcagttaacatctggaggtgcctcagtcgtgtgcttcttgaacaacttctaccccaaagacatcaatgtcaagtggaagattgatggcagtgaacgacaaaatggcgtcctgaacagttggactgatcaggacagcaaagacagcacctacagcatgtgtagcaccctcacgttgaccaaggacgagtatgaacgacataacagctatacctgtgaggccactcacaagacatcaacttcacccattgtcaagagcttcaacaggaatgagtctggtggtggcggatcaggtgggggaggctctggtggaggcggtagtacacacgacctgccaaaagccgtcgtcaaactggaaccaccctggattcaagtcctgaaagaagatactgttaccctgacctgcgagggcacccacaaccctggaaactcctccacccagtggttccacaacggaagaagtatcagatcccaggtccaggcctcctacaccttcaaggccacagtgaatgactccggcgagtacagatgccagatggagcagaccaggctgtccgaccctgtggatctgggagtgatcagcgactggctgctgctgcagacccctcagctggtgtttctggagggcgagacaatcacactgaggtgccactcctggaggaacaaactgctgaaccgcatctccttctttcataacgagaagtccgtgaggtaccaccactactcctccaacttctctattcctaaagccaaccactcccactccggcgactactactgcaagggctccctgggaaggaccctgcatcagtctaagcccgtcaccatcaccgtccagggccctaaatcctcccgctgattctaga

SEQ ID NO: 1268 - DNA, 1767 bp, synthetic construct
  source 1..1767: mol_type = other DNA
gcggccgcaaactacaagacagacttgcaaaagaaggcatgcacagctcagcactgctctgttgcctggtcctcctgactggggtgagggccgaagtgcagctggtggagagcggaggaggactggtgcagcctggaagatccctgaagctgagctgcgccgctagcggatttaccttttccaactacgacatggcctgggtgaggcaggcacctacaaaaggactggagtgggtggcttctatttcccccagcggcggtaggacctactacagagactctgtgaagggcagattcaccgtgtcccgggacaatgctaagagcacactgtacctgcagatggactccctgaggtccgaggacaccgctacatattactgcgccaggcacgacggaagctatttcgactactggggccagggcgtgatggtgactgtgagttccgctaaaacaacagccccatcggtctatccactggcccctgtgtctggagatacaactggctcctcggtgactctaggatgcctggtcaagggttatttccctgagccagtgaccttgacctggaactctggttctctgtccagtggtgtgcacacctgtccagctgtcctgcagtctgacctctacaccctcagcagctcagtgactgtaacctcgagcacctggcccagccagtccatcacctgcaatgtggcccacccggcaagcagcaccaaggtggacaagaaaattgagcccaaaagcagcgacaagacccacaccggtggtggcggatcaggtgggggaggctctggtggaggcggtagtacacacgacctgccaaaagccgtcgtcaaactggaaccaccctggattcaagtcctgaaagaagatactgttaccctgacctgcgagggcacccacaaccctggaaactcctccacccagtggttccacaacggaagaagtatcagatcccaggtccaggcctcctacaccttcaaggccacagtgaatgactccggcgagtacagatgccagatggagcagaccaggctgtccgaccctgtggatctgggagtgatcagcgactggctgctgctgcagacccctcagctggtgtttctggagggcgagacaatcacactgaggtgccactcctggaggaacaaactgctgaaccgcatctccttctttcataacgagaagtccgtgaggtaccaccactactcctccaacttctctattcctaaagccaaccactcccactccggcgactactactgcaagggctccctgggaaggaccctgcatcagtctaagcccgtcaccatcaccgtccagggccctaaatcctcccgcggtggcggtggatctggaggcggaggtagtggtgggggaggttcacaggtgcagctgcaggaaagtggcggaggactggtgcagccaggaggatctctgaggctgtcctgcgaggcttccggattcacattttccaggtttggtatgacatgggtgcggcaggcccccggaaaaggagtggaatgggtgtctggcatttcttccctgggagactccacactgtacgccgactctgtgaagggcaggttcaccatcagcagggacaacgccaagaacacactgtacctgcagatgaatagcctgaagcccgaggacaccgccgtgtattattgcaccatcggcggatcactgaatccaggcggccagggaacccaggtgacagtgtctagcggcggacaccatcaccatcatcactgattctaga

SEQ ID NO: 1269 - DNA, 1320 bp, synthetic construct
  source 1..1320: mol_type = other DNA
gcggccgcaaactacaagacagacttgcaaaagaaggcatgcacagctcagcactgctctgttgcctggtcctcctgactggggtgagggccgatacagtgctgacccagtcccccgcactggctgtgtctcctggagaaagggtgaccatttcctgccgcgcctccgaatccgtgtccacactgatgcactggtaccagcagaagcccgggcagcagcctaagctgctgatctacctggcaagccacctggaaagcggcgtgcctgctagatttagcggttccggctccggaaccgacttcacactgactatcgaccccgtggaggccgacgataccgctacatactactgccaggagtcctggaacgacccatggacattcggggggggaaccaagctggagctgaaaagagcagatgctgcaccaactgtatccatcttcccaccatccagtgagcagttaacatctggaggtgcctcagtcgtgtgcttcttgaacaacttctaccccaaagacatcaatgtcaagtggaagattgatggcagtgaacgacaaaatggcgtcctgaacagttggactgatcaggacagcaaagacagcacctacagcatgtgtagcaccctcacgttgaccaaggacgagtatgaacgacataacagctatacctgtgaggccactcacaagacatcaacttcacccattgtcaagagcttcaacaggaatgagtctggtggtggcggatcaggtgggggaggctctggtggaggcggtagtacacacgacctgccaaaagccgtcgtcaaactggaaccaccctggattcaagtcctgaaagaagatactgttaccctgacctgcgagggcacccacaaccctggaaactcctccacccagtggttccacaacggaagaagtatcagatcccaggtccaggcctcctacaccttcaaggccacagtgaatgactccggcgagtacagatgccagatggagcagaccaggctgtccgaccctgtggatctgggagtgatcagcgactggctgctgctgcagacccctcagctggtgtttctggagggcgagacaatcacactgaggtgccactcctggaggaacaaactgctgaaccgcatctccttctttcataacgagaagtccgtgaggtaccaccactactcctccaacttctctattcctaaagccaaccactcccactccggcgactactactgcaagggctccctgggaaggaccctgcatcagtctaagcccgtcaccatcaccgtccagggccctaaatcctcccgctgattctaga

SEQ ID NO: 1270 - DNA, 1608 bp, synthetic construct
  source 1..1608: mol_type = other DNA
gcggccgcaaactacaagacagacttgcaaaagaaggcatgcacagctcagcactgctctgttgcctggtcctcctgactggggtgagggccgaagtgcagctggtggagagcggaggaggactggtgcagcctggaagatccctgaagctgagctgcgccgctagcggatttaccttttccaactacgacatggcctgggtgaggcaggcacctacaaaaggactggagtgggtggcttctatttcccccagcggcggtaggacctactacagagactctgtgaagggcagattcaccgtgtcccgggacaatgctaagagcacactgtacctgcagatggactccctgaggtccgaggacaccgctacatattactgcgccaggcacgacggaagctatttcgactactggggccagggcgtgatggtgactgtgagttccgctaaaacaacagccccatcggtctatccactggcccctgtgtctggagatacaactggctcctcggtgactctaggatgcctggtcaagggttatttccctgagccagtgaccttgacctggaactctggttctctgtccagtggtgtgcacacctgtccagctgtcctgcagtctgacctctacaccctcagcagctcagtgactgtaacctcgagcacctggcccagccagtccatcacctgcaatgtggcccacccggcaagcagcaccaaggtggacaagaaaattgagcccaaaagcagcgacaagacccacaccggtggtggcggatcaggtgggggaggctctggtggaggcggtagtcaggtgcagctgcaggaaagtggcggaggactggtgcaggctggaggatctctgaggctgtcctgcgcagcttccggaagagctgtcggaaactacatcatcggctggtttaggcaggcccccggaaaagaaagggaatttgtggctactaccacaagggacgggggctctacattctacgccgactccgtcaagggcaggttcaccatcagcagggacaacgccaagaacaccgtgaacctgcagatgaactccctggagcccgaggacaccgcagtgtattattgcgccgccaagtcttggtccgtgccactgaggcctaccagcgctgatttcgactcctggggccagggtacccaggtgacagtgtctagtggtggcggtggatctggaggcggaggtagtggtgggggaggttcacaggtgcagctgcaggaaagtggcggaggactggtgcagccaggaggatctctgaggctgtcctgcgaggcttccggattcacattttccaggtttggtatgacatgggtgcggcaggcccccggaaaaggagtggaatgggtgtctggcatttcttccctgggagactccacactgtacgccgactctgtgaagggcaggttcaccatcagcagggacaacgccaagaacacactgtacctgcagatgaatagcctgaagcccgaggacaccgccgtgtattattgcaccatcggcggatcactgaatccaggcggccagggaacccaggtgacagtgtctagcggcggacaccatcaccatcatcactgattctaga

SEQ ID NO: 1271 - DNA, 1161 bp, synthetic construct
  source 1..1161: mol_type = other DNA
gcggccgcaaactacaagacagacttgcaaaagaaggcatgcacagctcagcactgctctgttgcctggtcctcctgactggggtgagggccgatacagtgctgacccagtcccccgcactggctgtgtctcctggagaaagggtgaccatttcctgccgcgcctccgaatccgtgtccacactgatgcactggtaccagcagaagcccgggcagcagcctaagctgctgatctacctggcaagccacctggaaagcggcgtgcctgctagatttagcggttccggctccggaaccgacttcacactgactatcgaccccgtggaggccgacgataccgctacatactactgccaggagtcctggaacgacccatggacattcggggggggaaccaagctggagctgaaaagagcagatgctgcaccaactgtatccatcttcccaccatccagtgagcagttaacatctggaggtgcctcagtcgtgtgcttcttgaacaacttctaccccaaagacatcaatgtcaagtggaagattgatggcagtgaacgacaaaatggcgtcctgaacagttggactgatcaggacagcaaagacagcacctacagcatgtgtagcaccctcacgttgaccaaggacgagtatgaacgacataacagctatacctgtgaggccactcacaagacatcaacttcacccattgtcaagagcttcaacaggaatgagtctggtggtggcggatcaggtgggggaggctctggtggaggcggtagtcaggtgcagctgcaggaaagtggcggaggactggtgcaggctggaggatctctgaggctgtcctgcgcagcttccggaagagctgtcggaaactacatcatcggctggtttaggcaggcccccggaaaagaaagggaatttgtggctactaccacaagggacgggggctctacattctacgccgactccgtcaagggcaggttcaccatcagcagggacaacgccaagaacaccgtgaacctgcagatgaactccctggagcccgaggacaccgcagtgtattattgcgccgccaagtcttggtccgtgccactgaggcctaccagcgctgatttcgactcctggggccagggtacccaggtgacagtgtctagttgattctaga

SEQ ID NO: 1272 - DNA, 1764 bp, synthetic construct
  source 1..1764: mol_type = other DNA
gcggccgcaaactacaagacagacttgcaaaagaaggcatgcacagctcagcactgctctgttgcctggtcctcctgactggggtgagggccgaagtgcaggtggtggagagcgacggaggactggtgcagcctggaagaagcctgaagctgccctgcgcagcaagcggatttacctttagcgactactacatggcctgggtgaggcaggcccctacaaagggactggagtgggtggcttccatttcctacgatggaagctccacctactacagggattctgtgaagggcaggttcaccatcagcagggacaacgctaagtcaaccctgtacctgcagatggacagcctgaggtccgaggacaccgctacatactactgcggcaggcactcctcttattttgactattggggccagggcgtgatggtgaccgtgtctagtgctaaaacaacagccccatcggtctatccactggcccctgtgtctggagatacaactggctcctcggtgactctaggatgcctggtcaagggttatttccctgagccagtgaccttgacctggaactctggttctctgtccagtggtgtgcacacctgtccagctgtcctgcagtctgacctctacaccctcagcagctcagtgactgtaacctcgagcacctggcccagccagtccatcacctgcaatgtggcccacccggcaagcagcaccaaggtggacaagaaaattgaacccaagtcctccgacaagacccacaccggtggtggcggatcaggtgggggaggctctggtggaggcggtagtacacacgacctgccaaaagccgtcgtcaaactggaaccaccctggattcaagtcctgaaagaagatactgttaccctgacctgcgagggcacccacaaccctggaaactcctccacccagtggttccacaacggaagaagtatcagatcccaggtccaggcctcctacaccttcaaggccacagtgaatgactccggcgagtacagatgccagatggagcagaccaggctgtccgaccctgtggatctgggagtgatcagcgactggctgctgctgcagacccctcagctggtgtttctggagggcgagacaatcacactgaggtgccactcctggaggaacaaactgctgaaccgcatctccttctttcataacgagaagtccgtgaggtaccaccactactcctccaacttctctattcctaaagccaaccactcccactccggcgactactactgcaagggctccctgggaaggaccctgcatcagtctaagcccgtcaccatcaccgtccagggccctaaatcctcccgcggtggcggtggatctggaggcggaggtagtggtgggggaggttcacaggtgcagctgcaggaaagtggcggaggactggtgcagccaggaggatctctgaggctgtcctgcgaggcttccggattcacattttccaggtttggtatgacatgggtgcggcaggcccccggaaaaggagtggaatgggtgtctggcatttcttccctgggagactccacactgtacgccgactctgtgaagggcaggttcaccatcagcagggacaacgccaagaacacactgtacctgcagatgaatagcctgaagcccgaggacaccgccgtgtattattgcaccatcggcggatcactgaatccaggcggccagggaacccaggtgacagtgtctagcggcggacaccatcaccatcatcactgattctaga

SEQ ID NO: 1273 - DNA, 1320 bp, synthetic construct
  source 1..1320: mol_type = other DNA
gcggccgcaaactacaagacagacttgcaaaagaaggcatgcacagctcagcactgctctgttgcctggtcctcctgactggggtgagggccgatatcgagctgacccagtcccccgctctggctgtgtctcctggagaaagggtgaccatctcctgtagggcttccgactccgtgtccaccctgatgcactggtaccagcagaagcccggccagcagcctaagctgctgatctacctggcctcccacctggagtccggagtgcctgctagattctccggctccggaagcggaaccgactttaccctgaccatcgaccccgtggaagctgacgacaccgcaacatactactgccagcagtcctggaacgacccctggacattcgggggaggtaccaagctggagctgaaaagagcagatgctgcaccaactgtatccatcttcccaccatccagtgagcagttaacatctggaggtgcctcagtcgtgtgcttcttgaacaacttctaccccaaagacatcaatgtcaagtggaagattgatggcagtgaacgacaaaatggcgtcctgaacagttggactgatcaggacagcaaagacagcacctacagcatgtgtagcaccctcacgttgaccaaggacgagtatgaacgacataacagctatacctgtgaggccactcacaagacatcaacttcacccattgtcaagagcttcaacaggaatgagtctggtggtggcggatcaggtgggggaggctctggtggaggcggtagtacacacgacctgccaaaagccgtcgtcaaactggaaccaccctggattcaagtcctgaaagaagatactgttaccctgacctgcgagggcacccacaaccctggaaactcctccacccagtggttccacaacggaagaagtatcagatcccaggtccaggcctcctacaccttcaaggccacagtgaatgactccggcgagtacagatgccagatggagcagaccaggctgtccgaccctgtggatctgggagtgatcagcgactggctgctgctgcagacccctcagctggtgtttctggagggcgagacaatcacactgaggtgccactcctggaggaacaaactgctgaaccgcatctccttctttcataacgagaagtccgtgaggtaccaccactactcctccaacttctctattcctaaagccaaccactcccactccggcgactactactgcaagggctccctgggaaggaccctgcatcagtctaagcccgtcaccatcaccgtccagggccctaaatcctcccgctgattctaga

SEQ ID NO: 1274 - DNA, 1434 bp, synthetic construct
  source 1..1434: mol_type = other DNA
gcggccgcaaactacaagacagacttgcaaaagaaggcatgcacagctcagcactgctctgttgcctggtcctcctgactggggtgagggcccaggtgcagctggtgcagagtggaggaggactggtgcagccaggaggaagtctgaggctgtcctgcgctgcttcaggcttcaccttctcctcctacgccatgcactgggtgaggcaggcacctggaaagggactggagtgggtgaccgtgatttcccccgatggacacaacacatactacgccgattccgtgaaaggcaggttcactatctcccgggacaacagcaagaacacactgtatctgcagatgaacagcctgagggccgaggacaccgctgtgtattactgcgccagggcctccgtgggtgctacaggacctttcgacatctggggacagggcacactggtgaccgtgagtagcgctaaaacgacacccccatctgtctatccactggcccctggatctgctgcccaaactaactccatggtgaccctgggatgcctggtcaagggctatttccctgagccagtgacagtgacctggaactctggttctctgtccagcggtgtgcacaccttcccagctgtcctgcagtctgacctctacactctgagcagctcagtgactgtcccctccagcccacggcccagcgagaccgtcacctgcaacgttgcccacccggccagcagcaccaaggtggacaagaaaattgtgcccagggattgtggttgtaagccttgcatatgtacagtcccagaagtatcatctgtcttcatcttccccccaaagcccaaggatgtgctcaccattactctgactcctaaggtcacgtgtgttgtggtagacatcagcaaggatgatcccgaggtccagttcagctggtttgtagatgatgtggaggtgcacacagctcagacgcaaccccgggaggagcagttcaacagcactttccgctcagtcagtgaacttcccatcatgcaccaggactggctcaatggcaaggagttcaaatgcagggtcaacagtgcagctttccctgcccccatcgagaaaaccatctccaaaaccaaaggcagaccgaaggctccgcaggtgtacaccattccacctcccaaggagcagatggccaaggataaagtcagtctgacctgcatgataacagacttcttccctgaagacattactgtggagtggcagtggaatgggcagccagcggagaactacaagaacactcagcccatcatgaatacaaacggctcttacttcgtctacagcaagctcaatgtgcagaagagcaactgggaggcaggaaatactttcacctgctctgtgttacatgagggcctgcacaaccaccatactgagaagagcctctcccactctcctggtaaatgattctaga

SEQ ID NO: 1275 - DNA, 747 bp, synthetic construct
  source 1..747: mol_type = other DNA
gcggccgcaaactacaagacagacttgcaaaagaaggcatgcacagctcagcactgctctgttgcctggtcctcctgactggggtgagggcctcttccgagctgacccagcctccttctgtgtctgtggctcccggtcagaccgtgactatcacctgccagggggactccctgcgatcttactacgcctcttggtaccagcagaagcccggcacagcccctaaactgctgatctacggcgagaataacagaccctccggcgtgccagaccggtttagtggaagctcctccggcacctccgcctctctgacaatcaccggagcccaggctgaggacgaggctgattactactgcaattcccgagactcctccggcacacacctgacagtgttcggcggtggaaccaagctgaccgtgctgggccagcccaagtcttcgccatcagtcaccctgtttccaccttcctctgaagagctcgagactaacaaggccacactggtgtgtacgatcactgatttctacccaggtgtggtgacagtggactggaaggtagatggtacccctgtcactcagggtatggagacaacccagccttccaaacagagcaacaacaagtacatggctagcagctacctgaccctgacagcaagagcatgggaaaggcatagcagttacagctgccaggtcactcatgaaggtcacactgtggagaagagtttgtcccgtgctgactgttcctgattctaga

SEQ ID NO: 1276 - protein, 7 aa, synthetic construct
LVGSKNV

SEQ ID NO: 1277 - protein, 6 aa, synthetic construct
MGKHRY

SEQ ID NO: 1278 - protein, 9 aa, synthetic construct
EPKSCDKTH

SEQ ID NO: 1279 - protein, 6 aa, synthetic construct
ERKCCV

SEQ ID NO: 1280 - protein, 11 aa, synthetic construct
ELKTPLGDTTH

SEQ ID NO: 1281 - protein, 6 aa, synthetic construct
ESKYGP

SEQ ID NO: 1282 - protein, 4 aa, synthetic construct
EFTP

SEQ ID NO: 1283 - protein, 6 aa, synthetic construct
HHHHHH

SEQ ID NO: 1284 - protein, 20 aa, synthetic construct
GGGGSGGGGSGGGGSGGGGS
